(19) United States
(12) Patent Application Publication
(10) Pub. No.: US 2010/0218271 A1
(43) Pub. Date: Aug. 26, 2010

(54) PLANTS HAVING IMPROVED CHARACTERISTICS AND METHOD FOR MAKING THE SAME

(75) Inventors: Ana Isabel Sanz Molinero, Gentbrugge (BE); Christophe Reuzeau, Tocan Saint Apre (FR); Valerie Frankard, Waterloo (BE); Vladimir Mironov, Gent (BE)

Correspondence Address: CONNOLLY BOVE LODGE & HUTZ, LLP, P O BOX 2207, WILMINGTON, DE, 19899, US

(73) Assignee: Crop Design N.V., Zwijnaarde (BE)

(21) Appl. No.: 12/375,433

(22) PCT Filed: Aug. 2, 2007
(86) PCT No.: PCT/EP2007/058043

§ 371 Date: Mar. 23, 2009

Related U.S. Application Data
(60) Provisional application No. 60/836,804, filed on Aug. 10, 2006.
(60) Provisional application No. 60/851,265, filed on Oct. 12, 2006.
(60) Provisional application No. 60/851,258, filed on Oct. 12, 2006.
(60) Provisional application No. 60/851,250, filed on Oct. 12, 2006.
(60) Provisional application No. 60/859,717, filed on Nov. 17, 2006.
(60) Provisional application No. 60/868,095, filed on Dec. 1, 2006.

(30) Foreign Application Priority Data
Oct. 5, 2005 (EP) 06121856.6
Aug. 2, 2006 (EP) 06118347.1
Sep. 20, 2006 (EP) 06120994.6
Oct. 6, 2006 (EP) 06121928.3
Oct. 27, 2006 (EP) 06123066.0
Oct. 31, 2006 (EP) 06123237.7

(51) Int. Cl. A01H 1/00

(52) U.S. Cl. 800/278

(57) ABSTRACT

The present invention relates generally to the field of molecular biology and concerns a method for enhancing various economically important characteristics in plants. More specifically, the present invention concerns a method for improving yield-related traits, such as enhanced yield and/or enhanced growth, or modified content of storage compounds in plants by modulating expression in a plant of a nucleic acid encoding a GRP (Growth Related Protein) polypeptide. The present invention also concerns plants having modulated expression of a nucleic acid encoding a GRP polypeptide, which plants have improved characterisitics relative to control plants. The invention also provides hitherto unknown GRP-encoding nucleic acids, and constructs comprising the same, useful in performing the methods of the invention.

[0001] The present invention relates generally to the field of molecular biology and concerns a method for improving various plant characteristics by modulating expression in a plant of a nucleic acid encoding a GRP (Growth Related Protein). The present invention also concerns plants having modulated expression of a nucleic acid encoding a GRP polypeptide, which plants have improved characteristics relative to corresponding wild type plants or other control plants. The invention also provides constructs useful in the methods of the invention.

[0002] The ever-increasing world population and the dwindling supply of arable land available for agriculture fuels research towards increasing the efficiency of agriculture. Conventional means for crop and horticultural improvements utilise selective breeding techniques to identify plants having desirable characteristics. However, such selective breeding techniques have several drawbacks, namely that these techniques are typically labour intensive and result in plants that often contain heterogeneous genetic components that may not always result in the desirable trait being passed on from parent plants. Advances in molecular biology have allowed mankind to modify the germplasm of animals and plants. Genetic engineering of plants entails the isolation and manipulation of genetic material (typically in the form of DNA or RNA) and the subsequent introduction of that genetic material into a plant. Such technology has the capacity to deliver crops or plants having various improved economic, agronomic or horticultural traits.

[0003] A trait of particular economic interest is increased yield. Yield is normally defined as the measurable produce of economic value from a crop. This may be defined in terms of quantity and/or quality. Yield is directly dependent on several factors, for example, the number and size of the organs, plant architecture (for example, the number of branches), seed production, leaf senescence and more. Root development, nutrient uptake, stress tolerance and early vigour may also be important factors in determining yield. Optimizing the above-mentioned factors may therefore contribute to increasing crop yield.

[0004] Seed yield is a particularly important trait, since the seeds of many plants are important for human and animal nutrition. Crops such as corn, rice, wheat, canola and soybean account for over half the total human caloric intake, whether through direct consumption of the seeds themselves or through consumption of meat products raised on processed seeds. They are also a source of sugars, oils and many kinds of metabolites used in industrial processes. Seeds contain an embryo (the source of new shoots and roots) and an endosperm (the source of nutrients for embryo growth during germination and during early growth of seedlings). The development of a seed involves many genes, and requires the transfer of metabolites from the roots, leaves and stems into the growing seed. The endosperm, in particular, assimilates the metabolic precursors of carbohydrates, oils and proteins and synthesizes them into storage macromolecules to fill out the grain.

[0005] Another important trait for many crops is early vigour. Improving early vigour is an important objective of modern rice breeding programs in both temperate and tropical rice cultivars. Long roots are important for proper soil anchorage in water-seeded rice. Where rice is sown directly into flooded fields, and where plants must emerge rapidly through water, longer shoots are associated with vigour. Where drill-seeding is practiced, longer mesocotyls and coleoptiles are important for good seedling emergence. The ability to engineer early vigour into plants would be of great importance in agriculture. For example, poor early vigour has been a limitation to the introduction of maize (Zea mays L.) hybrids based on Corn Belt germplasm in the European Atlantic.

[0006] A further important trait is that of improved abiotic stress tolerance. Abiotic stress is a primary cause of crop loss worldwide, reducing average yields for most major crop plants by more than 50% (Wang et al., Planta (2003) 218: 1-14). Abiotic stresses may be caused by drought, salinity, extremes of temperature, chemical toxicity and oxidative stress. The ability to improve plant tolerance to abiotic stress would be of great economic advantage to farmers worldwide and would allow for the cultivation of crops during adverse conditions and in territories where cultivation of crops may not otherwise be possible.

[0007] Crop yield may therefore be increased by optimising one of the above-mentioned factors.

[0008] Depending on the end use, the modification of certain yield traits may be favoured over others. For example for applications such as forage or wood production, or bio-fuel resource, an increase in the vegetative parts of a plant may be desirable, and for applications such as flour, starch or oil production, an increase in seed parameters may be particularly desirable. Even amongst the seed parameters, some may be favoured over others, depending on the application. Various mechanisms may contribute to increasing seed yield, whether that is in the form of increased seed size or increased seed number.

[0009] One approach to increasing yield (seed yield and/or biomass) in plants may be through modification of the inherent growth mechanisms of a plant, such as the cell cycle or various signalling pathways involved in plant growth or in defense mechanisms.

[0010] It has now been found that various characteristics may be improved in plants by modulating expression in a plant of a nucleic acid encoding a GRP polypeptide in a plant. The GRP polypeptide may be one of the following: an Ankyrin-Zinc finger polypeptide (AZ), a SYT polypeptide; a chloroplastic fructose-1,6-bisphosphatase (cpFBPase) polypeptide; a small inducible kinase (SIK); a Class II homeodomain-leucine zipper (HD Zip) transcription factor; and a SYB1 polypeptide. The improved characteristics comprise yield related traits, such as enhanced yield and/or enhanced growth, or modified content of storage compounds.

### BACKGROUND

### Ankyrin-Zinc Finger Polypeptide

[0011] Plant biomass is yield for forage crops like alfalfa, silage corn and hay. Many proxies for yield have been used in grain crops. Chief amongst these are estimates of plant size. Plant size can be measured in many ways depending on species and developmental stage, but include total plant dry weight, above-ground dry weight, above-ground fresh weight, leaf area, stem volume, plant height, rosette diameter, leaf length, root length, root mass, tiller number and leaf number. Many species maintain a conservative ratio between the size of different parts of the plant at a given developmental stage. These allometric relationships are used to extrapolate from one of these measures of size to another (e.g. Tittonell et al 2005 Agric Ecosys & Environ 105: 213). Plant size at an early developmental stage will typically correlate with plant size later in development. A larger plant with a greater leaf area can typically absorb more light and carbon dioxide than a smaller plant and therefore will likely gain a greater weight during the same period (Fasoula & Tollenaar 2005 Maydica 50:39). This is in addition to the potential continuation of the micro-environmental or genetic advantage that the plant had to achieve the larger size initially. There is a strong genetic component to plant size and growth rate (e.g. ter Steege et al 2005 Plant Physiology 139:1078), and so for a range of diverse genotypes plant size under one environmental condition is likely to correlate with size under another (Hittalmani et al 2003 Theoretical Applied Genetics 107:679). In this way a standard environment is used as a proxy for the diverse and dynamic environments encountered at different locations and times by crops in the field.

[0012] Harvest index, the ratio of seed yield to aboveground dry weight, is relatively stable under many environmental conditions and so a robust correlation between plant size and grain yield can often be obtained (e.g. Rebetzke et al 2002 Crop Science 42:739). These processes are intrinsically linked because the majority of grain biomass is dependent on current or stored photosynthetic productivity by the leaves and stem of the plant (Gardener et al 1985 Physiology of Crop Plants. Iowa State University Press, pp 68-73). Therefore, selecting for plant size, even at early stages of development, has been used as an indicator for future potential yield (e.g. Tittonell et al 2005 Agric Ecosys & Environ 105: 213). When testing for the impact of genetic differences on stress tolerance, the ability to standardize soil properties, temperature, water and nutrient availability and light intensity is an intrinsic advantage of greenhouse or plant growth chamber environments compared to the field. However, artificial limitations on yield due to poor pollination due to the absence of wind or insects, or insufficient space for mature root or canopy growth, can restrict the use of these controlled environments for testing yield differences. Therefore, measurements of plant size in early development, under standardized conditions in a growth chamber or greenhouse, are standard practices to provide indication of potential genetic yield advantages.

[0013] Transcription is performed by RNA polymerases. These polymerases are usually associated with other proteins (transcription factors) that determine the specificity of the transcription process. The transcription factors bind to cis-regulatory elements of the gene and may also mediate binding of other regulatory proteins. Stegmaier et al. proposed a classification of transcription factors based on their DNA-binding domains. 5 superclasses were discriminated, based on the presence of: 1) basic domains, 2) zinc-coordinating domains, 3) helix-turn-helix domains, 4) beta scaffold domains with minor groove contacts and 0) other domains (Stegmaier et al., Genome informatics 15, 276-286, 2004). The group of transcription factors comprising zinc-coordinating domains is quite divers and may be further classified according to their conserved cysteine and histidine residues, including the WRKY domains, C6 zinc clusters, DM and GCM domains.

[0014] Besides DNA binding motifs, transcription factors may also comprise protein-protein interaction motifs. One such motif is the ankyrin motif. It is present in very diverse families of proteins, usually as a repeat of 2 to over 20 units. Each unit contains two antiparallel helices and a beta-hairpin.

[0015] Although many plant proteins with zinc finger domains are well characterised, little is known about plant proteins comprising the C3H1 zinc finger motif. PEI1, a transcription factor that reportedly plays a role in embryo development, has a zinc finger motif that resembles the C3H1 motif but lacks an ankyrin motif (Li and Thomas, Plant Cell 10, 383-398, 1998). WO 02/44389 describes AtSIZ, a transcription factor isolated from Arabidopsis. Expression of AtSIZ under control of the CaMV35S promoter was found to promote transcription of stress-induced genes, and plants with increased expression of AtSIZ reportedly had a higher survival rate under salt stress than control plants, but no analysis was provided with respect to seed yield. It was postulated that AtSIZ could be used for increasing resistance in plants to osmotic stress.

### SYT

[0016] Abiotic stresses such as drought stress, salinity stress, heat stress and cold stress, or a combination of one or more of these, are major limiting factors of plant growth and productivity (Boyer (1982) Science 218: 443-448). These stresses have as common theme important for plant growth water availability. Since high salt content in some soils results in less available water for cell intake, its effect is similar to those observed under drought conditions. Additionally, under freezing temperatures, plant cells loose water as a result of ice formation that starts from the apoplast and withdraws water from the symplast (McKersie and Leshem (1994) Stress and stress coping in cultivated plants, Kluwer Academic Publishers). During heat stress, stomata aperture is affected to adjust cooling by evapotranspiration, thereby affecting the water content of the plant. Commonly, a plant's molecular response mechanisms to each of these stress conditions is similar.

[0017] Plants are exposed during their entire life cycle to conditions of reduced environmental water content. Most plants have evolved strategies to protect themselves against these conditions. However, if the severity and duration of the stress conditions are too great, the effects on plant development, growth and yield of most crop plant are profound. Continuous exposure to reduced environmental water availability causes major alterations in plant metabolism. These great changes in metabolism ultimately lead to cell death and consequently to yield losses. Crop losses and crop yield losses of major crops such as rice, maize (corn), and wheat caused by these stresses represent a significant economic and political factor and contribute to food shortages in many parts of the world.

[0018] Another example of abiotic environmental stress is the reduced availability of one or more nutrients that need to be assimilated by the plants for growth and development. Because of the strong influence of nutrition utilization efficiency on plant yield and product quality, a huge amount of fertilizer is poured onto fields to optimize plant growth and quality. Productivity of plants is limited by three primary nutrients: phosphorous, potassium and nitrogen, which are usually the rate-limiting elements in plant growth. The major nutritional element required for plant growth is nitrogen (N). It is a constituent of numerous important compounds found in living cells, including amino acids, proteins (enzymes), nucleic acids, and chlorophyll. 1.5% to 2% of plant dry matter is nitrogen and approximately 16% of total plant protein. Thus, nitrogen availability is a major limiting factor in crop plant growth and production (Frink et al. (1999) Proc Natl Acad Sci USA 96(4): 1175-1180), and has a major impact on protein accumulation and amino acid composition. Therefore, of great interest are crop plants with an increased yield when grown under nitrogen-limiting conditions.

[0019] Plant biomass is yield for forage crops like alfalfa, silage corn and hay. Many proxies for yield have been used in grain crops. Chief amongst these are estimates of plant size. Plant size can be measured in many ways depending on species and developmental stage, but include total plant dry weight, above-ground dry weight, above-ground fresh weight, leaf area, stem volume, plant height, rosette diameter, leaf length, root length, root mass, tiller number and leaf number. Many species maintain a conservative ratio between the size of different parts of the plant at a given developmental stage. These allometric relationships are used to extrapolate from one of these measures of size to another (e.g. Tittonell et al. (2005) Agric Ecosys & Environ 105: 213). Plant size at an early developmental stage will typically correlate with plant size later in development. A larger plant with a greater leaf area can typically absorb more light and carbon dioxide than a smaller plant and therefore will likely gain a greater weight during the same period (Fasoula & Tollenaar (2005) Maydica 50:39). This is in addition to the potential continuation of the micro-environmental or genetic advantage that the plant had to achieve the larger size initially. There is a strong genetic component to plant size and growth rate (e.g. ter Steege et al. (2005) Plant Physiology 139:1078), and so for a range of diverse genotypes plant size under one environmental condition is likely to correlate with size under another (Hittalmani et al. (2003) Theoretical Applied Genetics 107:679). In this way a standard environment is used as a proxy for the diverse and dynamic environments encountered at different locations and times by crops in the field.

[0020] Developing stress tolerant plants is a strategy that has the potential to solve or mediate at least some aspects of yield loss (McKersie and Leshem (1994) Stress and stress coping in cultivated plants, Kluwer Academic Publishers). However, traditional breeding strategies to develop new lines of plants that exhibit resistance (tolerance) to these types of stresses are relatively slow and require specific resistant lines for crossing with the desired line. Limited germplasm resources for stress tolerance and incompatibility in crosses between distantly related plant species represent significant problems encountered in conventional breeding. Furthermore, such selective breeding techniques are typically labour intensive and result in plants that often contain heterogeneous genetic components that may not always result in the desirable trait being passed on from parent plants. Advances in molecular biology have allowed mankind to modify the germplasm of animals and plants. Genetic engineering of plants entails the isolation and manipulation of genetic material (typically in the form of DNA or RNA) and the subsequent introduction of that genetic material into a plant. Such technology has the capacity to deliver crops or plants having various improved economic, agronomic or horticultural traits.

[0021] SYT is a transcriptional co-activator that, in plants, forms a functional complex with transcription activators of the GRF (growth-regulating factor) family of proteins (Kim H J, Kende H (2004) Proc Nat Acad Sc 101: 13374-9). SYT is called GIF for GRF-interacting factor in this paper, and AN3 for angustifolia3 in Horiguchi et al. (2005) Plant J 43: 68-78. The GRF transcription activators share structural domains (in the N-terminal region) with the SWI/SNF proteins of the chromatin-remodelling complexes in yeast (van der Knaap E et al., (2000) Plant Phys 122: 695-704). Transcriptional co-activators of these complexes are proposed to be involved in recruiting SWI/SNF complexes to enhancer and promoter regions to effect local chromatin remodelling (review Näär A M et al., (2001) Annu Rev Biochem 70: 475-501). The alteration in local chromatin structure modulates transcriptional activation. More precisely, SYT is proposed to interact with the plant SWI/SNF complex to affect transcriptional activation of GRF target gene(s) (Kim H J, Kende H (2004) Proc Nat Acad Sc 101: 13374-9).

[0022] SYT belongs to a gene family of three members in Arabidopsis. The SYT polypeptide shares homology with the human SYT. The human SYT polypeptide was shown to be a transcriptional co-activator (Thaete et al. (1999) Hum Molec Genet 8: 585-591). Three domains characterize the mammalian SYT polypeptide:
[0023] (i) the N-terminal SNH (SYT N-terminal homology) domain, conserved in mammals, plants, nematodes and fish;
[0024] (ii) the C-terminal QPGY-rich domain, composed predominantly of glycine, proline, glutamine and tyrosine, occurring at variable intervals;
[0025] (iii) a methionine-rich (Met-rich) domain located between the two previous domains.

[0026] In plant SYT polypeptides, the SNH domain is well conserved. The C-terminal domain is rich in glycine and glutamine, but not in proline or tyrosine. It has therefore been named the QG-rich domain in contrast to the QPGY domain of mammals. As with mammalian SYT, a Met-rich domain may be identified N-terminally of the QG domain. The QG-rich domain may be taken to be substantially the C-terminal remainder of the polypeptide (minus the SHN domain); the Met-rich domain is typically comprised within the first half of the QG-rich (from the N-terminus to the C-terminus). A second Met-rich domain may precede the SNH domain in plant SYT polypeptides (see FIG. 1).

[0027] A SYT loss-of function mutant and transgenic plants with reduced expression of SYT was reported to develop small and narrow leaves and petals, which have fewer cells (Kim H J, Kende H (2004) Proc Nat Acad Sc 101: 13374-9).

[0028] Overexpression of AN3 in Arabidopsis thaliana resulted in plants with leaves that were 20-30% larger than those of the wild type (Horiguchi et al. (2005) Plant J 43: 68-78).

[0029] In Japanese patent application 2004-350553, a method for controlling the size of leaves in the horizontal direction is described, by controlling the expression of the AN3 gene.

cpFBPase

[0030] Harvest index, the ratio of seed yield to aboveground dry weight, is relatively stable under many environmental conditions and so a robust correlation between plant size and grain yield can often be obtained (e.g. Rebetzke et al 2002 Crop Science 42:739). These processes are intrinsically linked because the majority of grain biomass is dependent on current or stored photosynthetic productivity by the leaves and stem of the plant (Gardener et al 1985 Physiology of Crop Plants. Iowa State University Press, pp 68-73). Therefore, selecting for plant size, even at early stages of development, has been used as an indicator for future potential yield (e.g. Tittonell et al 2005 Agric Ecosys & Environ 105: 213). When testing for the impact of genetic differences on stress tolerance, the ability to standardize soil properties, temperature, water and nutrient availability and light intensity is an intrinsic advantage of greenhouse or plant growth chamber environments compared to the field. However, artificial limitations on yield due to poor pollination due to the absence of wind or insects, or insufficient space for mature root or canopy growth, can restrict the use of these controlled environments for testing yield differences. Therefore, measurements of plant size in early development, under standardized conditions in a growth chamber or greenhouse, are standard practices to provide indication of potential genetic yield advantages.

[0031] Photosynthetic carbon metabolism in higher plants is an essential process for plant growth and crop yield. Carbohydrates are produced in higher plants by the fixation of atmospheric CO2 via the reductive pentose phosphate (Calvin) pathway. This process takes place in the chloroplast, and the newly synthesized triosephosphates can be kept in the stromal compartment for starch synthesis, or may be exported to the cytosol for sucrose formation. During photosynthesis, the newly synthesized carbohydrate is channelled to one or the other form depending on the needs of the plant and the environmental conditions.

[0032] The Calvin cycle is a complex pathway consisting of three phases of thirteen reactions catalyzed by eleven enzymes. One of the more important enzymes is chloroplastic fructose-1,6-bisphosphatase (cpFBPase), that catalyzes the irreversible conversion of fructose-1,6-bisphosphate to fructose-6-phosphate and Pi (inorganic P). The level of cpFBPase polypeptide in the chloroplast is very low compared to those of the other enzymes of the Calvin cycle.

[0033] The cpFBPase activity is regulated by the redox potential via the ferredoxin/thioredoxin system, which modulates the enzyme activity in response to light/dark conditions, and light-dependent changes in pH and Mg²⁺ levels (Chiadmi et al. (1999) EMBO 18(23): 6809-6815). More specifically, the cpFBPase polypeptide is active in the light, and inactive in the dark, which takes place by a thioredoxin-mediated reduction-oxidation interplay between SH groups of the enzyme molecule and also via a light-induced rise in pH and Mg2+ concentration in the chloroplast stroma (Buchanan (1980) Annu Rev Plant Physiol 31: 341-374; Jacquot (1984) Bot Acta 103: 323-334).

[0034] Higher plant and algal cpFBPase polypeptides perform the same enzymatic step, but differ somewhat in the regulation of enzymatic activity. More specifically, algal cpFBPase polypeptides present a strict requirement for reduction to be active, but are less strict on reductant specificity, i.e., they can be activated by different plastidic thioredoxins (Huppe and Buchanan (1989) Z Naturforsch 44(5-6): 487-94).

[0035] In photosynthetic (autotrophic) cells in addition to the cpFBPase polypeptide, there is a second FBPase polypeptide (isoform) located in the cytosol (cyFBPase) and involved in sucrose synthesis and gluconeogenesis. The cyFBPase polypeptide presents very different regulatory properties as compared to the cpFBPase polypeptide: it is inhibited by excess substrate, displays an allosteric inhibition by AMP and fructose-2,6-bisphophate, and presents a neutral pH optima. The cyFBPase polypeptide is found in heterotrophic systems (such as animal cells). An important difference between the cpFBPase polypeptides and the cyFBPase polypeptides is the presence in the former of an amino acid insertion that bears at least two conserved cysteine residues that are the targets of thioredoxin regulation.

[0036] Transgenic potato plants expressing a potato cpFBPase nucleic acid sequence under the control of a tuber-specific promoter were reported (Thorbjornsen et al. (2002) Planta 214: 616-624). The authors observed that the transgenic tubers did not differ from wild type tubers with respect to starch content, or the levels of neutral sugars and phosphorylated hexoses.

[0037] Two cyFBPase-encoding genes from cyanobacterium Synechococcus (FBPase/SBPase and FBPasell) were operably linked to a tomato rbcS transit peptide-coding sequence for chloroplastic subcellular targeting of the chimeric proteins (Miyagawa et al. (2001) Nature Biotech 19: 965-969; Tamoi et al. (2006) Plant Cell Physiol 47(3): 380-390). The activities of FBPase/SBPase and FBPasell polypeptides were not found to be regulated by redox conditions via the ferredoxin/thioredoxin system, since they lack the conserved cysteine residues. The tomato rbcS promoter was used to control the expression of both chimeric genes. Transgenic tobacco plants transformed with either chimeric construct were reported to grow significantly faster and larger than wild type plants under atmospheric conditions.

### SIK

[0038] Plant breeders are often interested in improving specific aspects of yield depending on the crop or plant in question, and the part of that plant or crop which is of economic value. For example, for certain crops, or for certain end uses, a plant breeder may look specifically for improvements in plant biomass (weight) of one or more parts of a plant, which may include aboveground (harvestable) parts and/or (harvestable) parts below ground. This is particularly relevant where the aboveground parts or below ground parts of a plant are for consumption. For many crops, particularly cereals, it is an improvement in seed yield that is highly desirable. Increased seed yield may manifest itself in many ways, with each individual aspect of seed yield being of varying importance to a plant breeder depending on the crop or plant in question and its end use. For example, seed yield may be manifested as or result from a) an increase in seed biomass (total seed weight) which may be on an individual seed basis and/or per plant and/or per square meter; b) increased number of flowers per plant; c) increased number of (filled) seeds; d) increased seed filling rate (which is typically expressed as the ratio between the number of filled seeds divided by the total number of seeds; e) increased harvest index, which is typically expressed as a ratio of the yield of harvestable parts, such as seeds, divided by the total biomass; and f) increased thousand kernel weight (TKW), which is typically extrapolated from the number of filled seeds counted and their total weight.

[0039] An increase in seed yield may also be manifested as an increase in seed size and/or seed volume. Furthermore, an increase in seed yield may also manifest itself as an increase in seed area and/or seed length and/or seed width and/or seed perimeter. Increased yield may also result in modified architecture, or may occur because of modified architecture.

[0040] Taking corn as an example, a yield increase may be manifested as one or more of the following: increase in the number of plants per square meter, an increase in the number of ears per plant, an increase in the number of rows, number of kernels per row, kernel weight, thousand kernel weight, ear length/diameter, increase in the seed filling rate (which is the number of filled seeds divided by the total number of seeds and multiplied by 100), among others. Taking rice as an example, a yield increase may manifest itself as an increase in one or more of the following: number of plants per square meter, number of panicles per plant, number of spikelets per panicle, number of flowers (florets) per panicle (which is expressed as a ratio of the number of filled seeds over the number of primary panicles), increase in the seed filling rate (which is the number of filled seeds divided by the total number of seeds and multiplied by 100), increase in thousand kernel weight, among others.

[0041] It would be of great advantage to a plant breeder to be able to be able to pick and choose the aspects of seed yield to be altered. It would be highly desirable to be able to pick off the shelf, so to speak, a gene suitable for altering a particular aspect, or component, of seed yield. For example an increase in the fill rate, combined with increased thousand kernel weight would be highly desirable for a crop such as corn. For rice and wheat a combination of increased fill rate, harvest index and increased thousand kernel weight would be highly desirable.

[0042] Published International patent Application, WO 02/074801, in the name of Genomine Inc., describes an AtSIK protein from Arabidopsis thaliana and a gene encoding said protein. It is mentioned that plants may be made resistant to osmotic stress by inhibiting expression of AtSIK, and that as a consequence the productivity of a plant may be increased. What is not mentioned however is which aspects of yield may be modified by inhibiting expression of AtSIK.

### HD Zip

[0043] The study and genetic manipulation of plants has a long history that began even before the framed studies of Gregor Mendel. In perfecting this science, scientists have accomplished modification of particular traits in plants ranging from potato tubers having increased starch content to oilseed plants such as canola and sunflower having increased or altered fatty acid content. With the increased consumption and use of plant oils, the modification of seed oil content and seed oil levels has become increasingly widespread (e.g. Töpfer et al., 1995, Science 268: 681-686). Manipulation of biosynthetic pathways in transgenic plants provides a number of opportunities for molecular biologists and plant biochemists to affect plant metabolism giving rise to the production of specific higher-value products. The seed oil production or composition has been altered in numerous traditional oilseed plants such as soybean (U.S. Pat. No. 5,955,650), canola (U.S. Pat. No. 5,955,650), sunflower (U.S. Pat. No. 6,084,164), rapeseed (Töpfer et al., 1995, Science 268:681-686), and non-traditional oil seed plants such as tobacco (Cahoon et al., 1992, Proc. Natl. Acad. Sci. USA89:11184-11188).

[0044] Plant seed oils comprise both neutral and polar lipids (See Table 1). The neutral lipids contain primarily triacylglycerol, which is the main storage lipid that accumulates in oil bodies in seeds. The polar lipids are mainly found in the various membranes of the seed cells, e.g. the microsomal, plastidial, and mitochondrial membranes, and the cell membrane. The neutral and polar lipids contain several common fatty acids (See Table 2) and a range of less common fatty acids. The fatty acid composition of membrane lipids is highly regulated and only a select number of fatty acids are found in membrane lipids. On the other hand, a large number of unusual fatty acids can be incorporated into the neutral storage lipids in seeds of many plant species (Van de Loo F. J. et al., 1993, Unusual Fatty Acids in Lipid Metabolism in Plants pp. 91-126, editor T S Moore Jr. CRC Press; Millar et al., 2000, Trends Plant Sci. 5:95-101).

TABLE 1
plant lipid classes

| | |
|---|---|
| Neutral Lipids | Triacylglycerol (TAG) |
| | Diacylglycerol (DAG) |
| | Monoacylglycerol (MAG) |
| Polar Lipids | Monogalactosyldiacylglycerol (MGDG) |
| | Digalactosyldiacylglycerol (DGDG) |
| | Phosphatidylglycerol (PG) |
| | Phosphatidylcholine (PC) |
| | Phosphatidylethanolamine (PE) |
| | Phosphatidylinositol (PI) |
| | Phosphatidylserine (PS) |
| | Sulfoquinovosyldiacylglycerol |

TABLE 2
common plant fatty acids

| | |
|---|---|
| 16:0 | palmitic acid |
| 16:1 | palmitoleic acid |
| 16:3 | hiragonic acid |
| 18:0 | stearic acid |
| 18:1 | oleic acid |
| 18:2 | linoleic acid |
| 18:3 | linolenic acid |
| γ-18:3 | gamma-linolenic acid* |
| 20:0 | arachidic acid |
| 20:1 | eicosenoic acid |
| 22:6 | docosahexanoic acid (DHA)* |
| 20:2 | eicosadienoic acid |
| 20:4 | arachidonic acid (AA)* |
| 20:5 | eicosapentaenoic acid (EPA)* |
| 22:1 | erucic acid |

[0045] In Table 2, the fatty acids denoted with an asterisk do not normally occur in plant seed oils, but their production in transgenic plant seed oil is of importance in plant biotechnology.

[0046] The primary sites of fatty acid biosynthesis in plants are the plastids. Fatty acid biosynthesis begins with the conversion of acetyl-CoA to malonyl-CoA by acetyl-CoA carboxylase (ACCase). The malonyl moiety is then transferred to an acyl carrier protein (ACP) by the malonyl-CoA:ACP transacylase. The enzyme beta-ketoacyl-ACP-synthase III (KAS III) catalyzes the initial condensation reaction of fatty acid biosynthesis, in which after decarboxylation of malonyl-ACP, the resulting carbanion is transferred to acetyl-CoA by a nucleophilic attack of the carbonyl-carbon, resulting in the formation of 3-ketobutyryl-ACP. The reaction cycle is completed by a reduction, a dehydration and again a reduction yielding butyric acid. This reaction cycle is repeated (with KAS I or KAS II catalyzing the condensation reaction) until the acyl-group reach a chain length of usually 16 to 18 carbon atoms. These acyl-ACPs can be desaturated by the stearoyl-ACP desaturase, used as substrates for plastidial acyltransferases in the formation of lipids through what has been referred to as the prokaryotic pathway, or exported to the cytosol after cleavage from ACP through the action of thioesterases. In the cytosol they enter the acyl-CoA pool and can be used for the synthesis of lipids through what has been referred to as the eukaryotic pathway in the endoplasmic reticulum.

[0047] Lipid synthesis through both the prokaryotic and eukaryotic pathways occurs through the successive acylation of glycerol-3-phosphate, catalyzed by glycerol-3-phosphate acyltransferases (GPAT) and lysophosphatidic acid acyltransferase (LPAAT) (Browse et al., 1986, Biochemical J. 235:25-31; Ohlrogge & Browse, 1995, 5 Plant Ce11 7:957-970). The resulting phosphatidic acid (PA) is the precursor for other polar membrane lipids such as monogalactosyldiacylglycerol (MGD), digalactosyldiacylglycerol (DGD), phosphatidylglycerol (PG) and sulfoquinovosyldiacylglycerol (SQD) in the plastid and phosphatidylcholine (PC), phosphatidylethanolamine (PE), phosphatidylinositol (PI) and phosphatidylserine (PS) in the endoplasmic reticulum. The polar lipids are also the sites of further modification of the acyl-chain such as desaturation, acetylenation, and hydroxylation. In the endoplasmic reticulum, PA is also the intermediate in the biosynthesis of triacylglycerol (TAG), the major component of neutral lipids and hence of seed oil. Furthermore, alternative pathways for the biosynthesis of TAGS can exist (i.e. transacylation through the action of phosphatidylcholine:diacylglycerol acyltransferase) (Voelker, 1996, Genetic Engineering ed.:Setlow 1 8: 111-113; Shanklin & Cahoon, 1998, Annu. Rev. Plant Physiol. Plant Mol. Biol. 49:611-641; Frentzen, 1998, Lipids 100:161-166; Millar et al., 2000, Trends Plant Sci. 5:95-101). The reverse reaction, the breakdown of triacylglycerol to diacylglycerol and fatty acids is catalyzed by lipases. Such a breakdown can be seen towards the end of seed development resulting in a certain reduction in seed oil. (Buchanan et al., 2000).

[0048] Storage lipids in seeds are synthesized from carbohydrate-derived precursors. Plants have a complete glycolytic pathway in the cytosol (Plaxton, 1996, Annu. Rev. Plant Physiol. Plant Mol. Biol. 47: 185-214), and it has been shown that a complete pathway also exists in the plastids of rapeseed (Kang & Rawsthorne, 1994, Plant J. 6:795-805). Sucrose is the primary source of carbon and energy, transported from the leaves into the developing seeds. During the storage phase of seeds, sucrose is converted in the cytosol to provide the metabolic precursors glucose-6-phosphate and pyruvate. These are transported into the plastids and converted into acetyl-CoA that serves as the primary precursor for the synthesis of fatty acids. Acetyl-CoA in the plastids is the central precursor for lipid biosynthesis. Acetyl-CoA can be formed in the plastids by different reactions, and the exact contribution of each reaction is still being debated (Ohlrogge & Browse, 1995, Plant Ce11 7:957-970). It is accepted, however, that a large part of the acetyl-CoA is derived from glucose-6-phospate and pyruvate that are imported from the cytoplasm into the plastids. Sucrose is produced in the source organs (leaves, or anywhere that photosynthesis occurs) and is transported to the developing seeds, also termed sink organs. In the developing seeds, sucrose is the precursor for all the storage compounds, i.e. starch, lipids, and partly the seed storage proteins. Therefore, it is clear that carbohydrate metabolism in which sucrose plays a central role is very important to the accumulation of seed storage compounds.

[0049] Although lipid and fatty acid content of seed oil can be modified by the traditional methods of plant breeding, the advent of recombinant DNA technology has allowed for easier manipulation of the seed oil content of a plant, and in some cases, has allowed for the alteration of seed oils in ways that could not be accomplished by breeding alone (See, e.g., Töpfer et al., 1995, Science 268:681-686). For example, introduction of a Δ¹²-hydroxylase nucleic acid sequence into transgenic tobacco resulted in the formation of a novel fatty acid, ricinoleic acid, into the tobacco seed oil (Van de Loo et al., 1995, Proc. Natl. Acad. Sci USA 92:6743-6747). Tobacco plants have also been engineered to produce low levels of petroselinic acid by the introduction and expression of an acyl-ACP desaturase from coriander (Cahoon et al., 1992, Proc. Natl. Acad. Sci USA 89: 11 184-11 188).

[0050] The modification of seed oil content in plants has significant medical, nutritional, and economic ramifications. With regard to the medical ramifications, the long chain fatty acids (C18 and longer) found in many seed oils have been linked to reductions in hypercholesterolemia and other clinical disorders related to coronary heart disease (Brenner, 1976, Adv. Exp. Med. Biol. 83:85-101). Therefore, consumption of a plant having increased levels of these types of fatty acids may reduce the risk of heart disease. Enhanced levels of seed oil content are also useful in increasing the large-scale production of seed oils and thereby reducing the cost of these oils.

[0051] As mentioned earlier, several desaturase nucleic acids such as the Δ⁶-desaturase nucleic acid, Δ¹²-desaturase nucleic acid and acyl-ACP desaturase nucleic acid have been cloned and demonstrated to encode enzymes required for fatty acid synthesis in various plant species. Oleosin nucleic acid sequences from species such as Brassica, soybean, carrot, pine, and Arabidopsis thaliana have also been cloned and determined to encode proteins associated with the phospholipid monolayer membrane of oil bodies in those plants.

[0052] It has now been found that nucleic acid sequences encoding Class II homeodomain-leucine zipper (HD-Zip) transcription factors are useful in modifying the content of storage compounds in seeds.

[0053] Transcription factors are usually defined as proteins that show sequence-specific DNA binding and that are capable of activating and/or repressing transcription. The Arabidopsis genome codes for at least 1533 transcriptional regulators, which account for ˜5.9% of its estimated total number of genes. About 45% of these transcription factors are reported to be from families specific to plants (Riechmann et al., 2000 (Science Vol. 290, 2105-2109)). One example of such a plant-specific family of transcription factors is the family of HD-Zip transcription factors.

[0054] Homeobox genes are transcription factors present in all eukaryotes and constitute a gene family of at least 89 members in Arabidopsis thaliana. They are characterized by the presence of a homeodomain, which usually consists of 60 conserved amino acid residues that form a helix-loop-helix-turn-helix structure that binds DNA. This DNA binding site is usually pseudopalindromic. Homeobox genes play crucial and diverse roles in many aspects of development, including the early development of animal embryos, the specification of cell types in yeast, and the initiation and maintenance of the shoot apical meristem in flowering plants (Sakakibara et al. Mol. Biol. Evol. 18(4): 491-502, 2001).

[0055] Numerous angiosperm homeobox genes have been isolated and sorted into seven distinct groups based on their amino acid similarities. These include the KNOX, BELL, HD-PHD-finger, HAT1, HAT 2, GL2, and ATHB8 groups. Genes in the latter four groups also encode a leucine zipper motif adjacent to the C-terminus of the homeodomain and collectively form the homeodomain-leucine zipper (HD-Zip) gene family. Aso et al., Mol. Biol. Evol. 16(4):544-552, 1999. Of the at least 89 members comprising the homeobox gene family in Arabidopsis thaliana, at least 47 comprise both a homeodomain and a leucine zipper. Although the combination of a homeodomain and a leucine zipper motif is unique to plants, it has also been encountered in moss in addition to vascular plants (Sakakibara et al. (2001) Mol Biol Evol 18(4): 491-502).

[0056] Homeodomain leucine zipper (HD-Zip) proteins constitute a family of transcription factors characterized by the presence of a DNA-binding domain (HD) and an adjacent leucine zipper (Zip) motif. The leucine zipper, adjacent to the C-terminal end of the homeodomain, consists of several heptad repeats (at least four) in which a leucine (occasionally a valine or an isoleucine) typically appears every seventh amino acid. The leucine zipper is important for protein dimerisation. This dimerisation is a prerequisite for DNA binding (Sessa et al. (1993) EMBO J 12(9): 3507-3517), and may proceed between two identical HD-Zip proteins (homodimer) or between two different HD-Zip proteins (heterodimer).

[0057] The group of angiosperm homeobox genes HAT1, HAT2, GL2, and ATHB8 groups have been renamed the HD-Zip I-IV subfamilies. The combination of a homeodomain and a leucine zipper motif is unique to higher plants, suggesting that the HD-Zip genes may be involved in the regulation of developmental processes specific to plants. Aso et al., Mol. Biol. Evol. 16(4):544-552, 1999. The functions of the HD-Zip genes are diverse among the different subfamilies. HD-Zip I and II genes are likely involved in signal transduction networks of light, dehydration-induced ABA, or auxin. These signal transduction networks are related to the general growth regulation of plants. The overexpression of sense or antisense HD-Zip I or II mRNA usually alters growth rate and development. Most members of the HD-Zip III subfamily play roles in cell differentiation in the stele. HD-Zip IV genes are related to the differentiation of the outermost cell layer. Sakakibara et al. Mol. Biol. Evol. 18(4): 491-502, 2001.

[0058] Different HD-Zip proteins have been shown to either activate or repress transcription. In Arabidopsis, the class I HD-Zip ATHB1, -5, -6, and -16 were shown to act as transcriptional activators in transient expression assays on Arabidopsis leaves using a reporter gene, luciferase (Henriksson et al. (2005) Plant Phys 139: 509-518). Two rice class I HDZip proteins, Oshox4 and Oshox5, acted as activators in transient expression assays on rice cell suspension cultures using another reporter gene (glucuronidase; Meijer et al. (2000) Mol Gen Genet 263:12-21). In contrast, two rice class II HD-Zip proteins, Oshox1 and Oshox3, acted as transcriptional repressors in the same experiments (Meijer et al. (1997) Plant J 11: 263-276; Meijer et al. (2000) supra).

[0059] The Class II HD-Zip gene from Arabidopsis thaliana, HAT4, also known as ATHB-2, has been reported to act as a regulator of shade-avoidance responses (Morelli and Ruberti TIPS Vol. 7 No. 9, September 2002).

### SYB1

[0060] Ran is a small signalling GTPase (GTP binding protein) in animal cells, which is involved in nucleocytoplasmic transport. Nucleocytoplasmic transport has been studied mainly in animal systems. Several Ran binding proteins are known, among them RanBP2, also known as Nup358. RanBP2 is postulated to associate on the cytoplasmic side with proteins of the Nuclear Pore Complex and putatively functions as a SUMO E3 ligase, although its structure is not of a typical E3 ligase. SUMOs (small ubiquitin-related modifiers) are eukaryotic proteins that are covalently ligated to other proteins, thereby regulating a number of cellular processes. In association with Ubc9 (which acts an E2 conjugating protein), RanBP2 labels substrates linked to nuclear import receptors with SUMO-1, in a similar way as ubiquitination of proteins. The SUMOylated substrate is then imported through the nuclear pore into the nucleus. Examples of imported proteins upon SUMOylation include NFX1-p15, a chaperone in mRNA export and the histone deacetylase HDAC-4. SUMO modification and hence RanBP2, is also implicated to play a role in gene expression, in cell cycle (during nuclear envelope breakdown), and in the formation of subcellular structures such as promyelocytic leukemia bodies.

[0061] Most of the studies were performed in model animal systems and little is known about the corresponding proteins and processes in plants. Proteins related to RanBP2, identified in Arabidopsis, share the zinc finger domains but are otherwise different in structure.

### SUMMARY

[0062] Surprisingly, it has now been found that modulating expression of a nucleic acid encoding a GRP polypeptide gives plants having improved characteristics relative to control plants.

[0063] In one aspect of the present invention, it has now been found that modulating expression in a plant of a nucleic acid encoding the AZ polypeptide from Arabidopsis (AtAZ) or a homologue thereof gives plants having increased yield relative to control plants. According to one embodiment of the present invention, there is provided a method for increasing plant yield, comprising modulating expression in a plant of a nucleic acid encoding the AZ polypeptide or a homologue thereof. Advantageously, performance of the methods according to the present invention results in plants having increased yield, particularly seed yield, relative to corresponding wild type plants. The present invention also provides nucleic acid sequences and constructs useful in performing such methods.

[0064] In another aspect of the present invention, it has now been found that modulating expression in a plant of a nucleic acid sequence encoding a SYT polypeptide gives plants having increased yield under abiotic stress relative to control plants. Therefore, the invention also provides a method for increasing plant yield under abiotic stress relative to control plants, comprising modulating expression in a plant of a nucleic acid sequence encoding a SYT polypeptide. The present invention also provides nucleic acid sequences and constructs useful in performing such methods.

[0065] In still another aspect of the present invention, it has now been found that increasing expression in aboveground parts of a plant of a nucleic acid sequence encoding a chloroplastic fructose-1,6-bisphosphatase (cpFBPase) polypeptide increases plant yield relative to control plants. Therefore, according to the present invention, there is provided a method for increasing plant yield relative to control plants, comprising increasing expression in aboveground parts of a plant of a nucleic acid sequence encoding a cpFBPase polypeptide. The present invention also provides nucleic acid sequences and constructs useful in performing such methods.

[0066] In yet another aspect of the present invention, it has now been found that modulating expression in a plant of a SIK nucleic acid and/or a SIK polypeptide gives plants having various improved yield-related traits relative to control plants, wherein overexpression of a SIK-encoding nucleic acid in a plant gives increased number of flowers per plant relative to control plants, and wherein the reduction or substantial elimination of a SIK nucleic acid gives increased thousand kernel weight, increased harvest index and increased fill rate relative to corresponding wild type plants. The present invention also provides nucleic acid sequences and constructs useful in performing such methods.

[0067] In a further aspect of the present invention, it has now been found that nucleic acids encoding Class II HD-Zip transcription factors are useful in modifying the content of storage compounds in seeds. The present invention therefore provides a method for modifying the content of storage compounds in seeds relative to control plants by modulating expression in a plant of a nucleic acid encoding a Class II HD-Zip transcription factor. The present invention also provides nucleic acid sequences and constructs useful in performing such methods. The invention further provides seeds having a modified content of storage compounds relative to control plants, which seeds have modulated expression of a nucleic acid encoding a Class II HD-Zip transcription factor. The present invention provides a method for modifying the content of storage compounds in seeds relative to control plants, comprising modulating expression in a plant of a nucleic acid encoding a Class II HD-Zip transcription factor.

[0068] In another aspect of the present invention, it has now been found that modulating expression in a plant of a nucleic acid encoding a SYB1 polypeptide gives plants having enhanced yield-related traits relative to control plants. This yield increase was surprisingly observed when the plants were cultivated under conditions without stress (non-stress conditions). The present invention therefore also provides a method for enhancing yield-related traits in plants relative to control plants, comprising modulating expression in a plant of a nucleic acid encoding a SYB1 polypeptide. The present invention also provides nucleic acid sequences and constructs useful in performing such methods.

### DEFINITIONS

### Polypeptide(s)/Protein(s)

[0069] The terms “polypeptide” and “protein” are used interchangeably herein and refer to amino acids in a polymeric form of any length, linked together by peptide bonds.

### Polynucleotide(s)/Nucleic Acid(s)/Nucleic Acid Sequence(s)/Nucleotide Sequence(s)

[0070] The terms “polynucleotide(s)”, “nucleic acid sequence(s)”, “nucleotide sequence(s)”, “nucleic acid(s)”, “nucleic acid molecule” are used interchangeably herein and refer to nucleotides, either ribonucleotides or deoxyribonucleotides or a combination of both, in a polymeric unbranched form of any length.

### Control Plant(s)

[0071] The choice of suitable control plants is a routine part of an experimental setup and may include corresponding wild type plants or corresponding plants without the gene of interest. The control plant is typically of the same plant species or even of the same variety as the plant to be assessed. The control plant may also be a nullizygote of the plant to be assessed. Nullizygotes are individuals missing the transgene by segregation. A “control plant” as used herein refers not only to whole plants, but also to plant parts, including seeds and seed parts.

[0072] Homoloque(s)

[0073] “Homologues” of a protein encompass peptides, oligopeptides, polypeptides, proteins and enzymes having amino acid substitutions, deletions and/or insertions relative to the unmodified protein in question and having similar biological and functional activity as the unmodified protein from which they are derived.

[0074] A deletion refers to removal of one or more amino acids from a protein.

[0075] An insertion refers to one or more amino acid residues being introduced into a predetermined site in a protein. Insertions may comprise N-terminal and/or C-terminal fusions as well as intra-sequence insertions of single or multiple amino acids. Generally, insertions within the amino acid sequence will be smaller than N- or C-terminal fusions, of the order of about 1 to 10 residues. Examples of N- or C-terminal fusion proteins or peptides include the binding domain or activation domain of a transcriptional activator as used in the yeast two-hybrid system, phage coat proteins, (histidine)-6-tag, glutathione S-transferase-tag, protein A, maltose-binding protein, dihydrofolate reductase, TagΨ100 epitope, c-myc epitope, FLAG®-epitope, lacZ, CMP (calmodulin-binding peptide), HA epitope, protein C epitope and VSV epitope.

[0076] A substitution refers to replacement of amino acids of the protein with other amino acids having similar properties (such as similar hydrophobicity, hydrophilicity, antigenicity, propensity to form or break α-helical structures or β-sheet structures). Amino acid substitutions are typically of single residues, but may be clustered depending upon functional constraints placed upon the polypeptide; insertions will usually be of the order of about 1 to 10 amino acid residues. The amino acid substitutions are preferably conservative amino acid substitutions. Conservative substitution tables are well known in the art (see for example Creighton (1984) Proteins. W.H. Freeman and Company (Eds) and Table 3 below).

TABLE 3
Examples of conserved amino acid substitutions

| Residue | Conservative Substitutions |
|---|---|
| Ala | Ser |
| Arg | Lys |
| Asn | Gln; His |
| Asp | Glu |
| Gln | Asn |
| Cys | Ser |
| Glu | Asp |
| Gly | Pro |
| His | Asn; Gln |
| Ile | Leu, Val |
| Leu | Ile; Val |
| Lys | Arg; Gln |
| Met | Leu; Ile |
| Phe | Met; Leu; Tyr |
| Ser | Thr; Gly |
| Thr | Ser; Val |
| Trp | Tyr |
| Tyr | Trp; Phe |
| Val | Ile; Leu |

[0077] Amino acid substitutions, deletions and/or insertions may readily be made using peptide synthetic techniques well known in the art, such as solid phase peptide synthesis and the like, or by recombinant DNA manipulation. Methods for the manipulation of DNA sequences to produce substitution, insertion or deletion variants of a protein are well known in the art. For example, techniques for making substitution mutations at predetermined sites in DNA are well known to those skilled in the art and include M13 mutagenesis, T7-Gen in vitro mutagenesis (USB, Cleveland, Ohio), QuickChange Site Directed mutagenesis (Stratagene, San Diego, Calif.), PCR-mediated site-directed mutagenesis or other site-directed mutagenesis protocols.

### Derivatives

[0078] “Derivatives” include peptides, oligopeptides, polypeptides which may, compared to the amino acid sequence of the naturally-occurring form of the protein, such as the protein of interest, comprise substitutions of amino acids with non-naturally occurring amino acid residues, or additions of non-naturally occurring amino acid residues. “Derivatives” of a protein also encompass peptides, oligopeptides, polypeptides which comprise naturally occurring altered (glycosylated, acylated, prenylated, phosphorylated, myristoylated, sulphated etc.) or non-naturally altered amino acid residues compared to the amino acid sequence of a naturally-occurring form of the polypeptide. A derivative may also comprise one or more non-amino acid substituents or additions compared to the amino acid sequence from which it is derived, for example a reporter molecule or other ligand, covalently or non-covalently bound to the amino acid sequence, such as a reporter molecule which is bound to facilitate its detection, and non-naturally occurring amino acid residues relative to the amino acid sequence of a naturally-occurring protein. Furthermore, “derivatives” also include fusions of the naturally-occurring form of the protein with tagging peptides such as FLAG, HIS6 or thioredoxin (for a review of tagging peptides, see Terpe, Appl. Microbiol. Biotechnol. 60, 523-533, 2003).

### Ortholoque(s)/Paraloque(s)

[0079] Orthologues and paralogues encompass evolutionary concepts used to describe the ancestral relationships of genes. Paralogues are genes within the same species that have originated through duplication of an ancestral gene; orthologues are genes from different organisms that have originated through speciation, and are also derived from a common ancestral gene.

### Domain

[0080] The term “domain” refers to a set of amino acids conserved at specific positions along an alignment of sequences of evolutionarily related proteins. While amino acids at other positions can vary between homologues, amino acids that are highly conserved at specific positions indicate amino acids that are likely essential in the structure, stability or function of a protein. Identified by their high degree of conservation in aligned sequences of a family of protein homologues, they can be used as identifiers to determine if any polypeptide in question belongs to a previously identified polypeptide family.

### Motif/Consensus Sequence/Signature

[0081] The term “motif” or “consensus sequence” or “signature” refers to a short conserved region in the sequence of evolutionarily related proteins. Motifs are frequently highly conserved parts of domains, but may also include only part of the domain, or be located outside of conserved domain (if all of the amino acids of the motif fall outside of a defined domain).

### Hybridisation

[0082] The term “hybridisation” as defined herein is a process wherein substantially homologous complementary nucleotide sequences anneal to each other. The hybridisation process can occur entirely in solution, i.e. both complementary nucleic acids are in solution. The hybridisation process can also occur with one of the complementary nucleic acids immobilised to a matrix such as magnetic beads, Sepharose beads or any other resin. The hybridisation process can furthermore occur with one of the complementary nucleic acids immobilised to a solid support such as a nitro-cellulose or nylon membrane or immobilised by e.g. photolithography to, for example, a siliceous glass support (the latter known as nucleic acid arrays or microarrays or as nucleic acid chips). In order to allow hybridisation to occur, the nucleic acid molecules are generally thermally or chemically denatured to melt a double strand into two single strands and/or to remove hairpins or other secondary structures from single stranded nucleic acids.

[0083] The term “stringency” refers to the conditions under which a hybridisation takes place. The stringency of hybridisation is influenced by conditions such as temperature, salt concentration, ionic strength and hybridisation buffer composition. Generally, low stringency conditions are selected to be about 30° C. lower than the thermal melting point (Tₘ) for the specific sequence at a defined ionic strength and pH. Medium stringency conditions are when the temperature is 20° C. below Tₘ, and high stringency conditions are when the temperature is 10° C. below Tₘ. High stringency hybridisation conditions are typically used for isolating hybridising sequences that have high sequence similarity to the target nucleic acid sequence. However, nucleic acids may deviate in sequence and still encode a substantially identical polypeptide, due to the degeneracy of the genetic code. Therefore medium stringency hybridisation conditions may sometimes be needed to identify such nucleic acid molecules.

[0084] The Tm is the temperature under defined ionic strength and pH, at which 50% of the target sequence hybridises to a perfectly matched probe. The Tₘ is dependent upon the solution conditions and the base composition and length of the probe. For example, longer sequences hybridise specifically at higher temperatures. The maximum rate of hybridisation is obtained from about 16° C. up to 32° C. below Tₘ. The presence of monovalent cations in the hybridisation solution reduce the electrostatic repulsion between the two nucleic acid strands thereby promoting hybrid formation; this effect is visible for sodium concentrations of up to 0.4 M (for higher concentrations, this effect may be ignored). Formamide reduces the melting temperature of DNA-DNA and DNA-RNA duplexes with 0.6 to 0.7° C. for each percent formamide, and addition of 50% formamide allows hybridisation to be performed at 30 to 45° C., though the rate of hybridisation will be lowered. Base pair mismatches reduce the hybridisation rate and the thermal stability of the duplexes. On average and for large probes, the Tm decreases about 1° C. per % base mismatch. The Tm may be calculated using the following equations, depending on the types of hybrids:

1) DNA-DNA hybrids (Meinkoth and Wahl, Anal. Biochem., 138: 267-284, 1984):

Tₘ=81.5° C.+16.6×log₁₀[Na⁺]^{a}+0.41×%[G/C^{b}]−500×[L^{c}]⁻¹−0.61×% formamide

2) DNA-RNA or RNA-RNA hybrids:

[0085] Tm=79.8+18.5(log₁₀[Na⁺]^{a})+0.58(% G/C^{b})+11.8(%G/C^{b})²−820/L^{c}

3) oligo-DNA or oligo-RNA^{d} hybrids:
[0086] For <20 nucleotides: Tₘ=2 (Iₙ)
[0087] For 20-35 nucleotides: Tₘ=22+1.46 (Iₙ)
[0088] ^{a} or for other monovalent cation, but only accurate in the 0.01-0.4 M range.
[0089] ^{b} only accurate for % GC in the 30% to 75% range.
[0090] ^{c}L=length of duplex in base pairs.
[0091] ^{d} oligo, oligonucleotide; I_{n,}=effective length of primer=2×(no. of G/C)+(no. of NT).

[0092] Non-specific binding may be controlled using any one of a number of known techniques such as, for example, blocking the membrane with protein containing solutions, additions of heterologous RNA, DNA, and SDS to the hybridisation buffer, and treatment with Rnase. For non-homologous probes, a series of hybridizations may be performed by varying one of (i) progressively lowering the annealing temperature (for example from 68° C. to 42° C.) or (ii) progressively lowering the formamide concentration (for example from 50% to 0%). The skilled artisan is aware of various parameters which may be altered during hybridisation and which will either maintain or change the stringency conditions.

[0093] Besides the hybridisation conditions, specificity of hybridisation typically also depends on the function of post-hybridisation washes. To remove background resulting from non-specific hybridisation, samples are washed with dilute salt solutions. Critical factors of such washes include the ionic strength and temperature of the final wash solution: the lower the salt concentration and the higher the wash temperature, the higher the stringency of the wash.

[0094] Wash conditions are typically performed at or below hybridisation stringency. A positive hybridisation gives a signal that is at least twice of that of the background. Generally, suitable stringent conditions for nucleic acid hybridisation assays or gene amplification detection procedures are as set forth above. More or less stringent conditions may also be selected. The skilled artisan is aware of various parameters which may be altered during washing and which will either maintain or change the stringency conditions.

[0095] For example, typical high stringency hybridisation conditions for DNA hybrids longer than 50 nucleotides encompass hybridisation at 65° C. in 1×SSC or at 42° C. in 1×SSC and 50% formamide, followed by washing at 65° C. in 0.3×SSC. Examples of medium stringency hybridisation conditions for DNA hybrids longer than 50 nucleotides encompass hybridisation at 50° C. in 4×SSC or at 40° C. in 6×SSC and 50% formamide, followed by washing at 50° C. in 2×SSC. The length of the hybrid is the anticipated length for the hybridising nucleic acid. When nucleic acids of known sequence are hybridised, the hybrid length may be determined by aligning the sequences and identifying the conserved regions described herein. 1×SSC is 0.15 M NaCl and 15 mM sodium citrate; the hybridisation solution and wash solutions may additionally include 5×Denhardt's reagent, 0.5-1.0% SDS, 100 pg/ml denatured, fragmented salmon sperm DNA, 0.5% sodium pyrophosphate.

[0096] For the purposes of defining the level of stringency, reference can be made to Sambrook et al. (2001) Molecular Cloning: a laboratory manual, 3^{rd} Edition, Cold Spring Harbor Laboratory Press, CSH, New York or to Current Protocols in Molecular Biology, John Wiley & Sons, N.Y. (1989 and yearly updates).

### Splice Variant

[0097] The term “splice variant” as used herein encompasses variants of a nucleic acid sequence in which selected introns and/or exons have been excised, replaced, displaced or added, or in which introns have been shortened or lengthened. Such variants will be ones in which the biological activity of the protein is substantially retained; this may be achieved by selectively retaining functional segments of the protein. Such splice variants may be found in nature or may be manmade. Methods for predicting and isolating such splice variants are well known in the art (see for example Foissac and Schiex (2005) BMC Bioinformatics 6: 25).

### Allelic Variant

[0098] Alleles or allelic variants are alternative forms of a given gene, located at the same chromosomal position. Allelic variants encompass Single Nucleotide Polymorphisms (SNPs), as well as Small Insertion/Deletion Polymorphisms (INDELs). The size of INDELs is usually less than 100 bp. SNPs and INDELs form the largest set of sequence variants in naturally occurring polymorphic strains of most organisms.

### Gene Shuffling/Directed Evolution

[0099] Gene shuffling or directed evolution consists of iterations of DNA shuffling followed by appropriate screening and/or selection to generate variants of nucleic acids or portions thereof encoding proteins having a modified biological activity (Castle et al., (2004) Science 304(5674): 1151-4; U.S. Pat. Nos. 5,811,238 and 6,395,547).

### Regulatory Element/Control Sequence/Promoter

[0100] The terms “regulatory element”, “control sequence” and “promoter” are all used interchangeably herein and are to be taken in a broad context to refer to regulatory nucleic acid sequences capable of effecting expression of the sequences to which they are ligated. The term “promoter” typically refers to a nucleic acid control sequence located upstream from the transcriptional start of a gene and which is involved in recognising and binding of RNA polymerase and other proteins, thereby directing transcription of an operably linked nucleic acid. Encompassed by the aforementioned terms are transcriptional regulatory sequences derived from a classical eukaryotic genomic gene (including the TATA box which is required for accurate transcription initiation, with or without a CCAAT box sequence) and additional regulatory elements (i.e. upstream activating sequences, enhancers and silencers) which alter gene expression in response to developmental and/or external stimuli, or in a tissue-specific manner. Also included within the term is a transcriptional regulatory sequence of a classical prokaryotic gene, in which case it may include a −35 box sequence and/or −10 box transcriptional regulatory sequences. The term “regulatory element” also encompasses a synthetic fusion molecule or derivative that confers, activates or enhances expression of a nucleic acid molecule in a cell, tissue or organ.

[0101] A “plant promoter” comprises regulatory elements, which mediate the expression of a coding sequence segment in plant cells. Accordingly, a plant promoter need not be of plant origin, but may originate from viruses or micro-organisms, for example from viruses which attack plant cells. The “plant promoter” can also originate from a plant cell, e.g. from the plant which is transformed with the nucleic acid sequence to be expressed in the inventive process and described herein. This also applies to other “plant” regulatory signals, such as “plant” terminators. The promoters upstream of the nucleotide sequences useful in the methods of the present invention can be modified by one or more nucleotide substitution(s), insertion(s) and/or deletion(s) without interfering with the functionality or activity of either the promoters, the open reading frame (ORF) or the 3′-regulatory region such as terminators or other 3′ regulatory regions which are located away from the ORF. It is furthermore possible that the activity of the promoters is increased by modification of their sequence, or that they are replaced completely by more active promoters, even promoters from heterologous organisms. For expression in plants, the nucleic acid molecule must, as described above, be linked operably to or comprise a suitable promoter which expresses the gene at the right point in time and with the required spatial expression pattern.

[0102] For the identification of functionally equivalent promoters, the promoter strength and/or expression pattern of a candidate promoter may be analysed for example by operably linking the promoter to a reporter gene and assaying the expression level and pattern of the reporter gene in various tissues of the plant. Suitable well-known reporter genes include for example beta-glucuronidase or beta-galactosidase. The promoter activity is assayed by measuring the enzymatic activity of the beta-glucuronidase or beta-galactosidase. The promoter strength and/or expression pattern may then be compared to that of a reference promoter (such as the one used in the methods of the present invention). Alternatively, promoter strength may be assayed by quantifying mRNA levels or by comparing mRNA levels of the nucleic acid used in the methods of the present invention, with mRNA levels of housekeeping genes such as 18S rRNA, using methods known in the art, such as Northern blotting with densitometric analysis of autoradiograms, quantitative real-time PCR or RT-PCR (Heid et al., 1996 Genome Methods 6: 986-994). Generally by “weak promoter” is intended a promoter that drives expression of a coding sequence at a low level. By “low level” is intended at levels of about 1/10,000 transcripts to about 1/100,000 transcripts, to about 1/500,0000 transcripts per cell. Conversely, a “strong promoter” drives expression of a coding sequence at high level, or at about 1/10 transcripts to about 1/100 transcripts to about 1/1000 transcripts per cell.

### Operably Linked

[0103] The term “operably linked” as used herein refers to a functional linkage between the promoter sequence and the gene of interest, such that the promoter sequence is able to initiate transcription of the gene of interest.

### Constitutive Promoter

[0104] A “constitutive promoter” refers to a promoter that is transcriptionally active during most, but not necessarily all, phases of growth and development and under most environmental conditions, in at least one cell, tissue or organ. Table 4a below gives examples of constitutive promoters.

TABLE 4a
Examples of constitutive promoters

| Gene Source | Reference |
|---|---|
| Actin | McElroy et al, Plant Cell, 2: 163-171, 1990 |
| HMGP | WO 2004/070039 |
| CAMV 35S | Odell et al, Nature, 313: 810-812, 1985 |
| CaMV 19S | Nilsson et al., Physiol. Plant. 100: 456-462, 1997 |
| GOS2 | de Pater et al, Plant J Nov; 2(6): 837-44, 1992, WO 2004/065596 |
| Ubiquitin | Christensen et al, Plant Mol. Biol. 18: 675-689, 1992 |
| Rice cyclophilin | Buchholz et al, Plant Mol Biol. 25(5): 837-43, 1994 |
| Maize H3 histone | Lepetit et al, Mol. Gen. Genet. 231: 276-285, 1992 |
| Alfalfa H3 histone | Wu et al. Plant Mol. Biol. 11: 641-649, 1988 |
| Actin 2 | An et al, Plant J. 10(1); 107-121, 1996 |
| 34S FMV | Sanger et al., Plant. Mol. Biol., 14, 1990: 433-443 |
| Rubisco small subunit | U.S. Pat. No. 4,962,028 |
| OCS | Leisner (1988) Proc Natl Acad Sci USA 85(5): 2553 |
| SAD1 | Jain et al., Crop Science, 39 (6), 1999: 1696 |
| SAD2 | Jain et al., Crop Science, 39 (6), 1999: 1696 |
| Nos | Shaw et al. (1984) Nucleic Acids Res. 12(20): 7831-7846 |
| V-ATPase | WO 01/14572 |
| Super promoter | WO 95/14098 |
| G-box proteins | WO 94/12015 |

### Ubiquitous Promoter

[0105] A ubiquitous promoter is active in substantially all tissues or cells of an organism.

### Developmentally-Regulated Promoter

[0106] A developmentally-regulated promoter is active during certain developmental stages or in parts of the plant that undergo developmental changes.

### Inducible Promoter

[0107] An inducible promoter has induced or increased transcription initiation in response to a chemical (for a review see Gatz 1997, Annu. Rev. Plant Physiol. Plant Mol. Biol., 48:89-108), environmental or physical stimulus, or may be “stress-inducible”, i.e. activated when a plant is exposed to various stress conditions, or a “pathogen-inducible” i.e. activated when a plant is exposed to exposure to various pathogens.

### Organ-Specific/Tissue-Specific Promoter

[0108] An organ-specific or tissue-specific promoter is one that is capable of preferentially initiating transcription in certain organs or tissues, such as the leaves, roots, seed tissue etc. For example, a “root-specific promoter” is a promoter that is transcriptionally active predominantly in plant roots, substantially to the exclusion of any other parts of a plant, whilst still allowing for any leaky expression in these other plant parts. Promoters able to initiate transcription in certain cells only are referred to herein as “cell-specific”.

[0109] A seed-specific promoter is transcriptionally active predominantly in seed tissue, but not necessarily exclusively in seed tissue (in cases of leaky expression). The seed-specific promoter may be active during seed development and/or during germination. The seed specific promoter may be endosperm/aleurone/embryo specific. Examples of seed-specific promoters are shown in Tables 4b to 4e below. Further examples of seed-specific promoters are given in Qing Qu and Takaiwa (Plant Biotechnol. J. 2, 113-125, 2004), which disclosure is incorporated by reference herein as if fully set forth.

TABLE 4b
Examples of seed-specific promoters

| Gene source | Reference |
|---|---|
| seed-specific genes | Simon et al., Plant Mol. Biol. 5: 191, 1985; |
| | Scofield et al., J. Biol. Chem. 262: 12202, 1987.; |
| | Baszczynski et al., Plant Mol. Biol. 14: 633, 1990. |
| Brazil Nut albumin | Pearson et al., Plant Mol. Biol. 18: 235-245, 1992. |
| legumin | Ellis et al., Plant Mol. Biol. 10: 203-214, 1988. |
| glutelin (rice) | Takaiwa et al., Mol. Gen. Genet. 208: 15-22, 1986; |
| | Takaiwa et al., FEBS Letts. 221: 43-47, 1987. |
| zein | Matzke et al Plant Mol Biol, 14(3): 323-32 1990 |
| napA | Stalberg et al, Planta 199: 515-519, 1996. |
| wheat LMW and HMW glutenin-1 | Mol Gen Genet 216: 81-90, 1989; NAR 17: 461-2, 1989 |
| wheat SPA | Albani et al, Plant Cell, 9: 171-184, 1997 |
| wheat α, β, γ-gliadins | EMBO J. 3: 1409-15, 1984 |
| barley Itr1 promoter | Diaz et al. (1995) Mol Gen Genet 248(5): 592-8 |
| barley B1, C, D, hordein | Theor Appl Gen 98: 1253-62, 1999; Plant J |
| | 4: 343-55, 1993; Mol Gen Genet 250: 750-60, 1996 |
| barley DOF | Mena et al, The Plant Journal, 116(1): 53-62, 1998 |
| blz2 | EP99106056.7 |
| synthetic promoter | Vicente-Carbajosa et al., Plant J. 13: 629-640, 1998. |
| rice prolamin NRP33 | Wu et al, Plant Cell Physiology 39(8) 885-889, 1998 |
| rice a-globulin Glb-1 | Wu et al, Plant Cell Physiology 39(8) 885-889, 1998 |
| rice OSH1 | Sato et al, Proc. Natl. Acad. Sci. USA, 93: |
| | 8117-8122, 1996 |
| rice α-globulin REB/OHP-1 | Nakase et al. Plant Mol. Biol. 33: 513-522, 1997 |
| rice ADP-glucose pyrophos- | Trans Res 6: 157-68, 1997 |
| phorylase | |
| maize ESR gene family | Plant J 12: 235-46, 1997 |
| sorghum α-kafirin | DeRose et al., Plant Mol. Biol 32: 1029-35, 1996 |
| KNOX | Postma-Haarsma et al, Plant Mol. Biol. 39: 257-71, 1999 |
| rice oleosin | Wu et al, J. Biochem. 123: 386, 1998 |
| sunflower oleosin | Cummins et al., Plant Mol. Biol. 19: 873-876, 1992 |
| PRO0117, putative rice 40S | WO 2004/070039 |
| ribosomal protein | |
| PRO0136, rice alanine | unpublished |
| aminotransferase | |
| PRO0147, trypsin inhibitor ITR1 | unpublished |
| (barley) | |
| PRO0151, rice WSI18 | WO 2004/070039 |
| PRO0175, rice RAB21 | WO 2004/070039 |
| PRO005 | WO 2004/070039 |
| PRO0095 | WO 2004/070039 |
| α-amylase (Amy32b) | Lanahan et al, Plant Cell 4: 203-211, 1992; Skriver et al, |
| | Proc Natl Acad Sci USA 88: 7266-7270, 1991 |
| cathepsin β-like gene | Cejudo et al, Plant Mol Biol 20: 849-856, 1992 |
| Barley Ltp2 | Kalla et al., Plant J. 6: 849-60, 1994 |
| Chi26 | Leah et al., Plant J. 4: 579-89, 1994 |
| Maize B-Peru | Selinger et al., Genetics 149; 1125-38, 1998 |

TABLE 4c
examples of endosperm-specific promoters

| Gene source | Reference |
|---|---|
| glutelin (rice) | Takaiwa et al. (1986) Mol Gen Genet 208: 15-22; |
| | Takaiwa et al. (1987) FEBS Letts. 221: 43-47 |
| zein | Matzke et al., (1990) Plant Mol Biol 14(3): 323-32 |
| wheat LMW and HMW | Colot et al. (1989) Mol Gen Genet 216: 81-90, |
| glutenin-1 | Anderson et al. (1989) NAR 17: 461-2 |
| wheat SPA | Albani et al. (1997) Plant Cell 9: 171-184 |
| wheat gliadins | Rafalski et al. (1984) EMBO 3: 1409-15 |
| barley Itr1 promoter | Diaz et al. (1995) Mol Gen Genet 248(5): 592-8 |
| barley B1, C, D, hordein | Cho et al. (1999) Theor Appl Genet 98: 1253-62; |
| | Muller et al. (1993) Plant J 4: 343-55; |
| | Sorenson et al. (1996) Mol Gen Genet 250: 750-60 |
| barley DOF | Mena et al, (1998) Plant J 116(1): 53-62 |
| blz2 | Onate et al. (1999) J Biol Chem 274(14): 9175-82 |
| Synthetic promoter | Vicente-Carbajosa et al. (1998) Plant J 13: 629-640 |
| rice prolamin NRP33 | Wu et al, (1998) Plant Cell Physiol 39(8) 885-889 |
| rice globulin Glb-1 | Wu et al. (1998) Plant Cell Physiol 39(8) 885-889 |
| rice globulin REB/OHP-1 | Nakase et al. (1997) Plant Molec Biol 33: 513-522 |
| rice ADP-glucose | Russell et al. (1997) Trans Res 6: 157-68 |
| pyrophosphorylase | |
| maize ESR gene family | Opsahl-Ferstad et al. (1997) Plant J 12: 235-46 |
| sorghum kafirin | DeRose et al. (1996) Plant Mol Biol 32: 1029-35 |

TABLE 4d
Examples of embryo specific promoters:

| Gene source | Reference |
|---|---|
| rice OSH1 | Sato et al, Proc. Natl. Acad. Sci. |
| | USA, 93: 8117-8122, 1996 |
| KNOX | Postma-Haarsma et al, |
| | Plant Mol. Biol. 39: 257-71, 1999 |
| PRO0151 | WO 2004/070039 |
| PRO0175 | WO 2004/070039 |
| PRO005 | WO 2004/070039 |
| PRO0095 | WO 2004/070039 |

TABLE 4e
Examples of aleurone-specific promoters:

| Gene source | Reference |
|---|---|
| α-amylase | Lanahan et al, Plant Cell 4: 203-211, 1992; Skriver et al, |
| (Amy32b) | Proc Natl Acad Sci USA 88: 7266-7270, 1991 |
| cathepsin | Cejudo et al, Plant Mol Biol 20: 849-856, 1992 |
| β-like gene | |
| Barley Ltp2 | Kalla et al., Plant J. 6: 849-60, 1994 |
| Chi26 | Leah et al., Plant J. 4: 579-89, 1994 |
| Maize B-Peru | Selinger et al., Genetics 149; 1125-38, 1998 |

[0110] A green tissue-specific promoter as defined herein is a promoter that is transcriptionally active predominantly in green tissue, substantially to the exclusion of any other parts of a plant, whilst still allowing for any leaky expression in these other plant parts.

[0111] Another example of a tissue-specific promoter is a meristem-specific promoter, which is transcriptionally active predominantly in meristematic tissue, substantially to the exclusion of any other parts of a plant, whilst still allowing for any leaky expression in these other plant parts.

### Terminator

[0112] The term “terminator” encompasses a control sequence which is a DNA sequence at the end of a transcriptional unit which signals 3′ processing and polyadenylation of a primary transcript and termination of transcription. The terminator can be derived from the natural gene, from a variety of other plant genes, or from T-DNA. The terminator to be added may be derived from, for example, the nopaline synthase or octopine synthase genes, or alternatively from another plant gene, or less preferably from any other eukaryotic gene.

### Modulation

[0113] The term “modulation” means in relation to expression or gene expression, a process in which the expression level is changed by said gene expression in comparison to the control plant, the expression level may be increased or decreased. The original, unmodulated expression may be of any kind of expression of a structural RNA (rRNA, tRNA) or mRNA with subsequent translation. The term “modulating the activity” shall mean any change of the expression of the inventive nucleic acid sequences or encoded proteins, which leads to increased yield and/or increased growth of the plants.

### Expression

[0114] The term “expression” or “gene expression” means the transcription of a specific gene or specific genes or specific genetic construct. The term “expression” or “gene expression” in particular means the transcription of a gene or genes or genetic construct into structural RNA (rRNA, tRNA) or mRNA with or without subsequent translation of the latter into a protein. The process includes transcription of DNA and processing of the resulting mRNA product.

### Increased Expression/Overexpression

[0115] The term “increased expression” or “overexpression” as used herein means any form of expression that is additional to the original wild-type expression level. Methods for increasing expression of genes or gene products are well documented in the art and include, for example, overexpression driven by appropriate promoters, the use of transcription enhancers or translation enhancers. Isolated nucleic acids which serve as promoter or enhancer elements may be introduced in an appropriate position (typically upstream) of a non-heterologous form of a polynucleotide so as to upregulate expression of a nucleic acid encoding the polypeptide of interest. For example, endogenous promoters may be altered in vivo by mutation, deletion, and/or substitution (see, Kmiec, U.S. Pat. No. 5,565,350; Zarling et al., WO9322443), or isolated promoters may be introduced into a plant cell in the proper orientation and distance from a gene of the present invention so as to control the expression of the gene.

[0116] If polypeptide expression is desired, it is generally desirable to include a polyadenylation region at the 3′-end of a polynucleotide coding region. The polyadenylation region can be derived from the natural gene, from a variety of other plant genes, or from T-DNA. The 3′ end sequence to be added may be derived from, for example, the nopaline synthase or octopine synthase genes, or alternatively from another plant gene, or less preferably from any other eukaryotic gene.

[0117] An intron sequence may also be added to the 5′ untranslated region (UTR) or the coding sequence of the partial coding sequence to increase the amount of the mature message that accumulates in the cytosol. Inclusion of a spliceable intron in the transcription unit in both plant and animal expression constructs has been shown to increase gene expression at both the mRNA and protein levels up to 1000-fold (Buchman and Berg (1988) Mol. Cell biol. 8: 4395-4405; Callis et al. (1987) Genes Dev 1:1183-1200). Such intron enhancement of gene expression is typically greatest when placed near the 5′ end of the transcription unit. Use of the maize introns Adh1-5 intron 1, 2, and 6, the Bronze-1 intron are known in the art. For general information see: The Maize Handbook, Chapter 116, Freeling and Walbot, Eds., Springer, N.Y. (1994).

### Endogenous Gene

[0118] Reference herein to an “endogenous” gene not only refers to the gene in question as found in a plant in its natural form (i.e., without there being any human intervention), but also refers to that same gene (or a substantially homologous nucleic acid/gene) in an isolated form subsequently (re)introduced into a plant (a transgene). For example, a transgenic plant containing such a transgene may encounter a substantial reduction of the transgene expression and/or substantial reduction of expression of the endogenous gene. The isolated gene may be isolated from an organism or may be manmade, for example by chemical synthesis.

### Decreased Expression

[0119] Reference herein to “decreased epression” or “reduction or substantial elimination” of expression is taken to mean a decrease in endogenous gene expression and/or polypeptide levels and/or polypeptide activity relative to control plants. The reduction or substantial elimination is in increasing order of preference at least 10%, 20%, 30%, 40% or 50%, 60%, 70%, 80%, 85%, 90%, or 95%, 96%, 97%, 98%, 99% or more reduced compared to that of control plants.

[0120] For the reduction or substantial elimination of expression an endogenous gene in a plant, a sufficient length of substantially contiguous nucleotides of a nucleic acid sequence is required. In order to perform gene silencing, this may be as little as 20, 19, 18, 17, 16, 15, 14, 13, 12, 11, 10 or fewer nucleotides, alternatively this may be as much as the entire gene (including the 5′ and/or 3′ UTR, either in part or in whole). The stretch of substantially contiguous nucleotides may be derived from the nucleic acid encoding the protein of interest (target gene), or from any nucleic acid capable of encoding an orthologue, paralogue or homologue of the protein of interest. Preferably, the stretch of substantially contiguous nucleotides is capable of forming hydrogen bonds with the target gene (either sense or antisense strand), more preferably, the stretch of substantially contiguous nucleotides has, in increasing order of preference, 50%, 60%, 70%, 80%, 85%, 90%, 95%, 96%, 97%, 98%, 99%, 100% sequence identity to the target gene (either sense or antisense strand). A nucleic acid sequence encoding a (functional) polypeptide is not a requirement for the various methods discussed herein for the reduction or substantial elimination of expression of an endogenous gene.

[0121] This reduction or substantial elimination of expression may be achieved using routine tools and techniques. A preferred method for the reduction or substantial elimination of endogenous gene expression is by introducing and expressing in a plant a genetic construct into which the nucleic acid (in this case a stretch of substantially contiguous nucleotides derived from the gene of interest, or from any nucleic acid capable of encoding an orthologue, paralogue or homologue of any one of the protein of interest) is cloned as an inverted repeat (in part or completely), separated by a spacer (non-coding DNA).

[0122] In such a preferred method, expression of the endogenous gene is reduced or substantially eliminated through RNA-mediated silencing using an inverted repeat of a nucleic acid or a part thereof (in this case a stretch of substantially contiguous nucleotides derived from the gene of interest, or from any nucleic acid capable of encoding an orthologue, paralogue or homologue of the protein of interest), preferably capable of forming a hairpin structure. The inverted repeat is cloned in an expression vector comprising control sequences. A non-coding DNA nucleic acid sequence (a spacer, for example a matrix attachment region fragment (MAR), an intron, a polylinker, etc.) is located between the two inverted nucleic acids forming the inverted repeat. After transcription of the inverted repeat, a chimeric RNA with a self-complementary structure is formed (partial or complete). This double-stranded RNA structure is referred to as the hairpin RNA (hpRNA). The hpRNA is processed by the plant into siRNAs that are incorporated into an RNA-induced silencing complex (RISC). The RISC further cleaves the mRNA transcripts, thereby substantially reducing the number of mRNA transcripts to be translated into polypeptides. For further general details see for example, Grierson et al. (1998) WO 98/53083; Waterhouse et al. (1999) WO 99/53050).

[0123] Performance of the methods of the invention does not rely on introducing and expressing in a plant a genetic construct into which the nucleic acid is cloned as an inverted repeat, but any one or more of several well-known “gene silencing” methods may be used to achieve the same effects.

[0124] One such method for the reduction of endogenous gene expression is RNA-mediated silencing of gene expression (downregulation). Silencing in this case is triggered in a plant by a double stranded RNA sequence (dsRNA) that is substantially similar to the target endogenous gene. This dsRNA is further processed by the plant into about 20 to about 26 nucleotides called short interfering RNAs (siRNAs). The siRNAs are incorporated into an RNA-induced silencing complex (RISC) that cleaves the mRNA transcript of the endogenous target gene, thereby substantially reducing the number of mRNA transcripts to be translated into a polypeptide. Preferably, the double stranded RNA sequence corresponds to a target gene.

[0125] Another example of an RNA silencing method involves the introduction of nucleic acid sequences or parts thereof (in this case a stretch of substantially contiguous nucleotides derived from the gene of interest, or from any nucleic acid capable of encoding an orthologue, paralogue or homologue of the protein of interest) in a sense orientation into a plant. “Sense orientation” refers to a DNA sequence that is homologous to an mRNA transcript thereof. Introduced into a plant would therefore be at least one copy of the nucleic acid sequence. The additional nucleic acid sequence will reduce expression of the endogenous gene, giving rise to a phenomenon known as co-suppression. The reduction of gene expression will be more pronounced if several additional copies of a nucleic acid sequence are introduced into the plant, as there is a positive correlation between high transcript levels and the triggering of co-suppression.

[0126] Another example of an RNA silencing method involves the use of antisense nucleic acid sequences. An “antisense” nucleic acid sequence comprises a nucleotide sequence that is complementary to a “sense” nucleic acid sequence encoding a protein, i.e. complementary to the coding strand of a double-stranded cDNA molecule or complementary to an mRNA transcript sequence. The antisense nucleic acid sequence is preferably complementary to the endogenous gene to be silenced. The complementarity may be located in the “coding region” and/or in the “non-coding region” of a gene. The term “coding region” refers to a region of the nucleotide sequence comprising codons that are translated into amino acid residues. The term “non-coding region” refers to 5′ and 3′ sequences that flank the coding region that are transcribed but not translated into amino acids (also referred to as 5′ and 3′ untranslated regions).

[0127] Antisense nucleic acid sequences can be designed according to the rules of Watson and Crick base pairing. The antisense nucleic acid sequence may be complementary to the entire nucleic acid sequence (in this case a stretch of substantially contiguous nucleotides derived from the gene of interest, or from any nucleic acid capable of encoding an orthologue, paralogue or homologue of the protein of interest), but may also be an oligonucleotide that is antisense to only a part of the nucleic acid sequence (including the mRNA 5′ and 3′ UTR). For example, the antisense oligonucleotide sequence may be complementary to the region surrounding the translation start site of an mRNA transcript encoding a polypeptide. The length of a suitable antisense oligonucleotide sequence is known in the art and may start from about 50, 45, 40, 35, 30, 25, 20, 15 or 10 nucleotides in length or less. An antisense nucleic acid sequence according to the invention may be constructed using chemical synthesis and enzymatic ligation reactions using methods known in the art. For example, an antisense nucleic acid sequence (e.g., an antisense oligonucleotide sequence) may be chemically synthesized using naturally occurring nucleotides or variously modified nucleotides designed to increase the biological stability of the molecules or to increase the physical stability of the duplex formed between the antisense and sense nucleic acid sequences, e.g., phosphorothioate derivatives and acridine substituted nucleotides may be used. Examples of modified nucleotides that may be used to generate the antisense nucleic acid sequences are well known in the art. Known nucleotide modifications include methylation, cyclization and ‘caps’ and substitution of one or more of the naturally occurring nucleotides with an analogue such as inosine. Other modifications of nucleotides are well known in the art.

[0128] The antisense nucleic acid sequence can be produced biologically using an expression vector into which a nucleic acid sequence has been subcloned in an antisense orientation (i.e., RNA transcribed from the inserted nucleic acid will be of an antisense orientation to a target nucleic acid of interest). Preferably, production of antisense nucleic acid sequences in plants occurs by means of a stably integrated nucleic acid construct comprising a promoter, an operably linked antisense oligonucleotide, and a terminator.

[0129] The nucleic acid molecules used for silencing in the methods of the invention (whether introduced into a plant or generated in situ) hybridize with or bind to mRNA transcripts and/or genomic DNA encoding a polypeptide to thereby inhibit expression of the protein, e.g., by inhibiting transcription and/or translation. The hybridization can be by conventional nucleotide complementarity to form a stable duplex, or, for example, in the case of an antisense nucleic acid sequence which binds to DNA duplexes, through specific interactions in the major groove of the double helix. Antisense nucleic acid sequences may be introduced into a plant by transformation or direct injection at a specific tissue site. Alternatively, antisense nucleic acid sequences can be modified to target selected cells and then administered systemically. For example, for systemic administration, antisense nucleic acid sequences can be modified such that they specifically bind to receptors or antigens expressed on a selected cell surface, e.g., by linking the antisense nucleic acid sequence to peptides or antibodies which bind to cell surface receptors or antigens. The antisense nucleic acid sequences can also be delivered to cells using the vectors described herein.

[0130] According to a further aspect, the antisense nucleic acid sequence is an a-anomeric nucleic acid sequence. An a-anomeric nucleic acid sequence forms specific double-stranded hybrids with complementary RNA in which, contrary to the usual b-units, the strands run parallel to each other (Gaultier et al. (1987) Nucl Ac Res 15: 6625-6641). The antisense nucleic acid sequence may also comprise a 2′-o-methylribonucleotide (Inoue et al. (1987) Nucl Ac Res 15, 6131-6148) or a chimeric RNA-DNA analogue (Inoue et al. (1987) FEBS Lett. 215, 327-330).

[0131] The reduction or substantial elimination of endogenous gene expression may also be performed using ribozymes. Ribozymes are catalytic RNA molecules with ribonuclease activity that are capable of cleaving a single-stranded nucleic acid sequence, such as an mRNA, to which they have a complementary region. Thus, ribozymes (e.g., hammerhead ribozymes (described in Haselhoff and Gerlach (1988) Nature 334, 585-591) can be used to catalytically cleave mRNA transcripts encoding a polypeptide, thereby substantially reducing the number of mRNA transcripts to be translated into a polypeptide. A ribozyme having specificity for a nucleic acid sequence can be designed (see for example: Cech et al. U.S. Pat. No. 4,987,071; and Cech et al. U.S. Pat. No. 5,116,742). Alternatively, mRNA transcripts corresponding to a nucleic acid sequence can be used to select a catalytic RNA having a specific ribonuclease activity from a pool of RNA molecules (Bartel and Szostak (1993) Science 261, 1411-1418). The use of ribozymes for gene silencing in plants is known in the art (e.g., Atkins et al. (1994) WO 94/00012; Lenne et al. (1995) WO 95/03404; Lutziger et al. (2000) WO 00/00619; Prinsen et al. (1997) WO 97/13865 and Scott et al. (1997) WO 97/38116).

[0132] Gene silencing may also be achieved by insertion mutagenesis (for example, T-DNA insertion or transposon insertion) or by strategies as described by, among others, Angell and Baulcombe ((1999) Plant J 20(3): 357-62), (Amplicon VIGS WO 98/36083), or Baulcombe (WO 99/15682).

[0133] Gene silencing may also occur if there is a mutation on an endogenous gene and/or a mutation on an isolated gene/nucleic acid subsequently introduced into a plant. The reduction or substantial elimination may be caused by a non-functional polypeptide. For example, the polypeptide may bind to various interacting proteins; one or more mutation(s) and/or truncation(s) may therefore provide for a polypeptide that is still able to bind interacting proteins (such as receptor proteins) but that cannot exhibit its normal function (such as signalling ligand).

[0134] A further approach to gene silencing is by targeting nucleic acid sequences complementary to the regulatory region of the gene (e.g., the promoter and/or enhancers) to form triple helical structures that prevent transcription of the gene in target cells. See Helene, C., Anticancer Drug Res. 6, 569-84, 1991; Helene et al., Ann. N.Y. Acad. Sci. 660, 27-36 1992; and Maher, L. J. Bioassays 14, 807-15, 1992.

[0135] Other methods, such as the use of antibodies directed to an endogenous polypeptide for inhibiting its function in planta, or interference in the signalling pathway in which a polypeptide is involved, will be well known to the skilled man. In particular, it can be envisaged that manmade molecules may be useful for inhibiting the biological function of a target polypeptide, or for interfering with the signalling pathway in which the target polypeptide is involved.

[0136] Alternatively, a screening program may be set up to identify in a plant population natural variants of a gene, which variants encode polypeptides with reduced activity. Such natural variants may also be used for example, to perform homologous recombination. Artificial and/or natural microRNAs (miRNAs) may be used to knock out gene expression and/or mRNA translation. Endogenous miRNAs are single stranded small RNAs of typically 19-24 nucleotides long. They function primarily to regulate gene expression and/or mRNA translation. Most plant microRNAs (miRNAs) have perfect or near-perfect complementarity with their target sequences. However, there are natural targets with up to five mismatches. They are processed from longer non-coding RNAs with characteristic fold-back structures by double-strand specific RNases of the Dicer family. Upon processing, they are incorporated in the RNA-induced silencing complex (RISC) by binding to its main component, an Argonaute protein. MiRNAs serve as the specificity components of RISC, since they base-pair to target nucleic acids, mostly mRNAs, in the cytoplasm. Subsequent regulatory events include target mRNA cleavage and destruction and/or translational inhibition. Effects of miRNA overexpression are thus often reflected in decreased mRNA levels of target genes.

[0137] Artificial microRNAs (amiRNAs), which are typically 21 nucleotides in length, can be genetically engineered specifically to negatively regulate gene expression of single or multiple genes of interest. Determinants of plant microRNA target selection are well known in the art. Empirical parameters for target recognition have been defined and can be used to aid in the design of specific amiRNAs, (Schwab et al., Dev. Cell 8, 517-527, 2005). Convenient tools for design and generation of amiRNAs and their precursors are also available to the public (Schwab et al., Plant Cell 18, 1121-1133, 2006).

[0138] For optimal performance, the gene silencing techniques used for reducing expression in a plant of an endogenous gene requires the use of nucleic acid sequences from monocotyledonous plants for transformation of monocotyledonous plants, and from dicotyledonous plants for transformation of dicotyledonous plants. Preferably, a nucleic acid sequence from any given plant species is introduced into that same species. For example, a nucleic acid sequence from rice is transformed into a rice plant. However, it is not an absolute requirement that the nucleic acid sequence to be introduced originates from the same plant species as the plant in which it will be introduced. It is sufficient that there is substantial homology between the endogenous target gene and the nucleic acid to be introduced.

[0139] Described above are examples of various methods for the reduction or substantial elimination of expression in a plant of an endogenous gene. A person skilled in the art would readily be able to adapt the aforementioned methods for silencing so as to achieve reduction of expression of an endogenous gene in a whole plant or in parts thereof through the use of an appropriate promoter, for example.

### Selectable Marker (Gene)/Reporter Gene

[0140] “Selectable marker”, “selectable marker gene” or “reporter gene” includes any gene that confers a phenotype on a cell in which it is expressed to facilitate the identification and/or selection of cells that are transfected or transformed with a nucleic acid construct of the invention. These marker genes enable the identification of a successful transfer of the nucleic acid molecules via a series of different principles. Suitable markers may be selected from markers that confer antibiotic or herbicide resistance, that introduce a new metabolic trait or that allow visual selection. Examples of selectable marker genes include genes conferring resistance to antibiotics (such as nptII that phosphorylates neomycin and kanamycin, or hpt, phosphorylating hygromycin, or genes conferring resistance to, for example, bleomycin, streptomycin, tetracyclin, chloramphenicol, ampicillin, gentamycin, geneticin (G418), spectinomycin or blasticidin), to herbicides (for example bar which provides resistance to Basta®; aroA or gox providing resistance against glyphosate, or the genes conferring resistance to, for example, imidazolinone, phosphinothricin or sulfonylurea), or genes that provide a metabolic trait (such as manA that allows plants to use mannose as sole carbon source or xylose isomerase for the utilisation of xylose, or antinutritive markers such as the resistance to 2-deoxyglucose). Expression of visual marker genes results in the formation of colour (for example β-glucuronidase, GUS or β-galactosidase with its coloured substrates, for example X-Gal), luminescence (such as the luciferin/luceferase system) or fluorescence (Green Fluorescent Protein, GFP, and derivatives thereof). This list represents only a small number of possible markers. The skilled worker is familiar with such markers. Different markers are preferred, depending on the organism and the selection method.

[0141] It is known that upon stable or transient integration of nucleic acids into plant cells, only a minority of the cells takes up the foreign DNA and, if desired, integrates it into its genome, depending on the expression vector used and the transfection technique used. To identify and select these integrants, a gene coding for a selectable marker (such as the ones described above) is usually introduced into the host cells together with the gene of interest. These markers can for example be used in mutants in which these genes are not functional by, for example, deletion by conventional methods. Furthermore, nucleic acid molecules encoding a selectable marker can be introduced into a host cell on the same vector that comprises the sequence encoding the polypeptides of the invention or used in the methods of the invention, or else in a separate vector. Cells which have been stably transfected with the introduced nucleic acid can be identified for example by selection (for example, cells which have integrated the selectable marker survive whereas the other cells die).

[0142] Since the marker genes, particularly genes for resistance to antibiotics and herbicides, are no longer required or are undesired in the transgenic host cell once the nucleic acids have been introduced successfully, the process according to the invention for introducing the nucleic acids advantageously employs techniques which enable the removal or excision of these marker genes. One such a method is what is known as co-transformation. The co-transformation method employs two vectors simultaneously for the transformation, one vector bearing the nucleic acid according to the invention and a second bearing the marker gene(s). A large proportion of transformants receives or, in the case of plants, comprises (up to 40% or more of the transformants), both vectors. In case of transformation with Agrobacteria, the transformants usually receive only a part of the vector, i.e. the sequence flanked by the T-DNA, which usually represents the expression cassette. The marker genes can subsequently be removed from the transformed plant by performing crosses. In another method, marker genes integrated into a transposon are used for the transformation together with desired nucleic acid (known as the Ac/Ds technology). The transformants can be crossed with a transposase source or the transformants are transformed with a nucleic acid construct conferring expression of a transposase, transiently or stable. In some cases (approx. 10%), the transposon jumps out of the genome of the host cell once transformation has taken place successfully and is lost. In a further number of cases, the transposon jumps to a different location. In these cases the marker gene must be eliminated by performing crosses. In microbiology, techniques were developed which make possible, or facilitate, the detection of such events. A further advantageous method relies on what is known as recombination systems; whose advantage is that elimination by crossing can be dispensed with. The best-known system of this type is what is known as the Cre/lox system. Crel is a recombinase that removes the sequences located between the loxP sequences. If the marker gene is integrated between the loxP sequences, it is removed once transformation has taken place successfully, by expression of the recombinase. Further recombination systems are the HIN/HIX, FLP/FRT and REP/STB system (Tribble et al., J. Biol. Chem., 275, 2000: 22255-22267; Velmurugan et al., J. Cell Biol., 149, 2000: 553-566). A site-specific integration into the plant genome of the nucleic acid sequences according to the invention is possible. Naturally, these methods can also be applied to microorganisms such as yeast, fungi or bacteria.

### Transgenic/Transgene/Recombinant

[0143] For the purposes of the invention, “transgenic”, “transgene” or “recombinant” means with regard to, for example, a nucleic acid sequence, an expression cassette, gene construct or a vector comprising the nucleic acid sequence or an organism transformed with the nucleic acid sequences, expression cassettes or vectors according to the invention, all those constructions brought about by recombinant methods in which either
[0144] (a) the nucleic acid sequences encoding proteins useful in the methods of the invention, or
[0145] (b) genetic control sequence(s) which is operably linked with the nucleic acid sequence according to the invention, for example a promoter, or
[0146] (c) a) and b)
   are not located in their natural genetic environment or have been modified by recombinant methods, it being possible for the modification to take the form of, for example, a substitution, addition, deletion, inversion or insertion of one or more nucleotide residues. The natural genetic environment is understood as meaning the natural genomic or chromosomal locus in the original plant or the presence in a genomic library. In the case of a genomic library, the natural genetic environment of the nucleic acid sequence is preferably retained, at least in part. The environment flanks the nucleic acid sequence at least on one side and has a sequence length of at least 50 bp, preferably at least 500 bp, especially preferably at least 1000 bp, most preferably at least 5000 bp. A naturally occurring expression cassette—for example the naturally occurring combination of the natural promoter of the nucleic acid sequences with the corresponding nucleic acid sequence encoding a polypeptide useful in the methods of the present invention, as defined above—becomes a transgenic expression cassette when this expression cassette is modified by non-natural, synthetic (“artificial”) methods such as, for example, mutagenic treatment. Suitable methods are described, for example, in U.S. Pat. No. 5,565,350 or WO 00/15815.

[0147] A transgenic plant for the purposes of the invention is thus understood as meaning, as above, that the nucleic acids used in the method of the invention are not at their natural locus in the genome of said plant, it being possible for the nucleic acids to be expressed homologously or heterologously. However, as mentioned, transgenic also means that, while the nucleic acids according to the invention or used in the inventive method are at their natural position in the genome of a plant, the sequence has been modified with regard to the natural sequence, and/or that the regulatory sequences of the natural sequences have been modified. Transgenic is preferably understood as meaning the expression of the nucleic acids according to the invention at an unnatural locus in the genome, i.e. homologous or, preferably, heterologous expression of the nucleic acids takes place. Preferred transgenic plants are mentioned herein.

### Transformation

[0148] The term “introduction” or “transformation” as referred to herein encompasses the transfer of an exogenous polynucleotide into a host cell, irrespective of the method used for transfer. Plant tissue capable of subsequent clonal propagation, whether by organogenesis or embryogenesis, may be transformed with a genetic construct of the present invention and a whole plant regenerated there from. The particular tissue chosen will vary depending on the clonal propagation systems available for, and best suited to, the particular species being transformed. Exemplary tissue targets include leaf disks, pollen, embryos, cotyledons, hypocotyls, megagametophytes, callus tissue, existing meristematic tissue (e.g., apical meristem, axillary buds, and root meristems), and induced meristem tissue (e.g., cotyledon meristem and hypocotyl meristem). The polynucleotide may be transiently or stably introduced into a host cell and may be maintained non-integrated, for example, as a plasmid. Alternatively, it may be integrated into the host genome. The resulting transformed plant cell may then be used to regenerate a transformed plant in a manner known to persons skilled in the art.

[0149] The transfer of foreign genes into the genome of a plant is called transformation. Transformation of plant species is now a fairly routine technique. Advantageously, any of several transformation methods may be used to introduce the gene of interest into a suitable ancestor cell. The methods described for the transformation and regeneration of plants from plant tissues or plant cells may be utilized for transient or for stable transformation. Transformation methods include the use of liposomes, electroporation, chemicals that increase free DNA uptake, injection of the DNA directly into the plant, particle gun bombardment, transformation using viruses or pollen and microprojection. Methods may be selected from the calcium/polyethylene glycol method for protoplasts (Krens, F. A. et al., (1982) Nature 296, 72-74; Negrutiu I et al. (1987) Plant Mol Biol 8: 363-373); electroporation of protoplasts (Shillito R. D. et al. (1985) Bio/Technol 3, 1099-1102); microinjection into plant material (Crossway A et al., (1986) Mol. Gen Genet 202: 179-185); DNA or RNA-coated particle bombardment (Klein T M et al., (1987) Nature 327: 70) infection with (non-integrative) viruses and the like. Transgenic plants, including transgenic crop plants, are preferably produced via Agrobacterium-mediated transformation. An advantageous transformation method is the transformation in planta. To this end, it is possible, for example, to allow the agrobacteria to act on plant seeds or to inoculate the plant meristem with agrobacteria. It has proved particularly expedient in accordance with the invention to allow a suspension of transformed agrobacteria to act on the intact plant or at least on the flower primordia. The plant is subsequently grown on until the seeds of the treated plant are obtained (Clough and Bent, Plant J. (1998) 16, 735-743). Methods for Agrobacterium-mediated transformation of rice include well known methods for rice transformation, such as those described in any of the following: European patent application EP 1198985 A1, Aldemita and Hodges (Planta 199: 612-617, 1996); Chan et al. (Plant Mol Biol 22 (3): 491-506, 1993), Hiei et al. (Plant J 6 (2): 271-282, 1994), which disclosures are incorporated by reference herein as if fully set forth. In the case of corn transformation, the preferred method is as described in either Ishida et al. (Nat. Biotechnol 14(6): 745-50, 1996) or Frame et al. (Plant Physiol 129(1): 13-22, 2002), which disclosures are incorporated by reference herein as if fully set forth. Said methods are further described by way of example in B. Jenes et al., Techniques for Gene Transfer, in: Transgenic Plants, Vol. 1, Engineering and Utilization, eds. S.D. Kung and R. Wu, Academic Press (1993) 128-143 and in Potrykus Annu. Rev. Plant Physiol. Plant Molec. Biol. 42 (1991) 205-225). The nucleic acids or the construct to be expressed is preferably cloned into a vector, which is suitable for transforming Agrobacterium tumefaciens, for example pBin19 (Bevan et al., Nucl. Acids Res. 12 (1984) 8711). Agrobacteria transformed by such a vector can then be used in known manner for the transformation of plants, such as plants used as a model, like Arabidopsis (Arabidopsis thaliana is within the scope of the present invention not considered as a crop plant), or crop plants such as, by way of example, tobacco plants, for example by immersing bruised leaves or chopped leaves in an agrobacterial solution and then culturing them in suitable media. The transformation of plants by means of Agrobacterium tumefaciens is described, for example, by Hofgen and Willmitzer in Nucl. Acid Res. (1988) 16, 9877 or is known inter alia from F. F. White, Vectors for Gene Transfer in Higher Plants; in Transgenic Plants, Vol. 1, Engineering and Utilization, eds. S. D. Kung and R. Wu, Academic Press, 1993, pp. 15-38.

[0150] In addition to the transformation of somatic cells, which then have to be regenerated into intact plants, it is also possible to transform the cells of plant meristems and in particular those cells which develop into gametes. In this case, the transformed gametes follow the natural plant development, giving rise to transgenic plants. Thus, for example, seeds of Arabidopsis are treated with agrobacteria and seeds are obtained from the developing plants of which a certain proportion is transformed and thus transgenic [Feldman, K A and Marks M D (1987). Mol Gen Genet 208:274-289; Feldmann K (1992). In: C Koncz, N-H Chua and J Shell, eds, Methods in Arabidopsis Research. Word Scientific, Singapore, pp. 274-289]. Alternative methods are based on the repeated removal of the inflorescences and incubation of the excision site in the center of the rosette with transformed agrobacteria, whereby transformed seeds can likewise be obtained at a later point in time (Chang (1994). Plant J. 5: 551-558; Katavic (1994). Mol Gen Genet, 245: 363-370). However, an especially effective method is the vacuum infiltration method with its modifications such as the “floral dip” method. In the case of vacuum infiltration of Arabidopsis, intact plants under reduced pressure are treated with an agrobacterial suspension [Bechthold, N (1993). C R Aced Sci Paris Life Sci, 316: 1194-1199], while in the case of the “floral dip” method the developing floral tissue is incubated briefly with a surfactant-treated agrobacterial suspension [Clough, S J and Bent A F (1998) The Plant J. 16, 735-743]. A certain proportion of transgenic seeds are harvested in both cases, and these seeds can be distinguished from non-transgenic seeds by growing under the above-described selective conditions. In addition the stable transformation of plastids is of advantages because plastids are inherited maternally is most crops reducing or eliminating the risk of transgene flow through pollen. The transformation of the chloroplast genome is generally achieved by a process which has been schematically displayed in Klaus et al., 2004 [Nature Biotechnology 22 (2), 225-229]. Briefly the sequences to be transformed are cloned together with a selectable marker gene between flanking sequences homologous to the chloroplast genome. These homologous flanking sequences direct site specific integration into the plastome. Plastidal transformation has been described for many different plant species and an overview is given in Bock (2001) Transgenic plastids in basic research and plant biotechnology. J Mol Biol. 2001 Sep. 21; 312 (3):425-38 or Maliga, P (2003) Progress towards commercialization of plastid transformation technology. Trends Biotechnol. 21, 20-28. Further biotechnological progress has recently been reported in form of marker free plastid transformants, which can be produced by a transient co-integrated maker gene (Klaus et al., 2004, Nature Biotechnology 22(2), 225-229).

### T-DNA Activation Tagging

[0151] T-DNA activation tagging (Hayashi et al. Science (1992) 1350-1353), involves insertion of T-DNA, usually containing a promoter (may also be a translation enhancer or an intron), in the genomic region of the gene of interest or 10 kb up- or downstream of the coding region of a gene in a configuration such that the promoter directs expression of the targeted gene. Typically, regulation of expression of the targeted gene by its natural promoter is disrupted and the gene falls under the control of the newly introduced promoter. The promoter is typically embedded in a T-DNA. This T-DNA is randomly inserted into the plant genome, for example, through Agrobacterium infection and leads to modified expression of genes near the inserted T-DNA. The resulting transgenic plants show dominant phenotypes due to modified expression of genes close to the introduced promoter.

### Tilling

[0152] The term “TILLING” is an abbreviation of “Targeted Induced Local Lesions In Genomes” and refers to a mutagenesis technology useful to generate and/or identify nucleic acids encoding proteins with modified expression and/or activity. TILLING also allows selection of plants carrying such mutant variants. These mutant variants may exhibit modified expression, either in strength or in location or in timing (if the mutations affect the promoter for example). These mutant variants may exhibit higher activity than that exhibited by the gene in its natural form. TILLING combines high-density mutagenesis with high-throughput screening methods. The steps typically followed in TILLING are: (a) EMS mutagenesis (Redei G P and Koncz C (1992) In Methods in Arabidopsis Research, Koncz C, Chua N H, Schell J, eds. Singapore, World Scientific Publishing Co, pp. 16-82; Feldmann et al., (1994) In Meyerowitz E M, Somerville C R, eds, Arabidopsis. Cold Spring Harbor Laboratory Press, Cold Spring Harbor, N.Y., pp 137-172; Lightner J and Caspar T (1998) In J Martinez-Zapater, J Salinas, eds, Methods on Molecular Biology, Vol. 82. Humana Press, Totowa, N.J., pp 91-104); (b) DNA preparation and pooling of individuals; (c) PCR amplification of a region of interest; (d) denaturation and annealing to allow formation of heteroduplexes; (e) DHPLC, where the presence of a heteroduplex in a pool is detected as an extra peak in the chromatogram; (f) identification of the mutant individual; and (g) sequencing of the mutant PCR product. Methods for TILLING are well known in the art (McCallum et al., (2000) Nat Biotechnol 18: 455-457; reviewed by Stemple (2004) Nat Rev Genet 5(2): 145-50).

### Homologous Recombination

[0153] Homologous recombination allows introduction in a genome of a selected nucleic acid at a defined selected position. Homologous recombination is a standard technology used routinely in biological sciences for lower organisms such as yeast or the moss Physcomitrella. Methods for performing homologous recombination in plants have been described not only for model plants (Offring a et al. (1990) EMBO J 9(10): 3077-84) but also for crop plants, for example rice (Terada et al. (2002) Nat Biotech 20(10): 1030-4; lida and Terada (2004) Curr Opin Biotech 15(2): 132-8).

### Yield

[0154] The term “yield” in general means a measurable produce of economic value, typically related to a specified crop, to an area, and to a period of time. Individual plant parts directly contribute to yield based on their number, size and/or weight, or the actual yield is the yield per square meter for a crop and year, which is determined by dividing total production (includes both harvested and appraised production) by planted square meters. The term “yield” of a plant may relate to vegetative biomass (root and/or shoot biomass), to reproductive organs, and/or to propagules (such as seeds) of that plant.

### Early Vigour

[0155] “Early vigour” refers to active healthy well-balanced growth especially during early stages of plant growth, and may result from increased plant fitness due to, for example, the plants being better adapted to their environment (i.e. optimizing the use of energy resources and partitioning between shoot and root). Plants having early vigour also show increased seedling survival and a better establishment of the crop, which often results in highly uniform fields (with the crop growing in uniform manner, i.e. with the majority of plants reaching the various stages of development at substantially the same time), and often better and higher yield. Therefore, early vigour may be determined by measuring various factors, such as thousand kernel weight, percentage germination, percentage emergence, seedling growth, seedling height, root length, root and shoot biomass and many more.

### Increase/Improve/Enhance

[0156] The terms “increase”, “improve” or “enhance” are interchangeable and shall mean in the sense of the application at least a 3%, 4%, 5%, 6%, 7%, 8%, 9%, 10%, preferably at least 15% or 20%, more preferably 25%, 30%, 35% or 40% more yield and/or growth in comparison to control plants as defined herein.

### Seed Yield

[0157] Increased seed yield may manifest itself as one or more of the following: a) an increase in seed biomass (total seed weight) which may be on an individual seed basis and/or per plant and/or per square meter; b) increased number of flowers per plant; c) increased number of (filled) seeds; d) increased seed filling rate (which is expressed as the ratio between the number of filled seeds divided by the total number of seeds); e) increased harvest index, which is expressed as a ratio of the yield of harvestable parts, such as seeds, divided by the total biomass; and f) increased thousand kernel weight (TKW), which is extrapolated from the number of filled seeds counted and their total weight. An increased TKW may result from an increased seed size and/or seed weight, and may also result from an increase in embryo and/or endosperm size.

[0158] An increase in seed yield may also be manifested as an increase in seed size and/or seed volume. Furthermore, an increase in seed yield may also manifest itself as an increase in seed area and/or seed length and/or seed width and/or seed perimeter. Increased yield may also result in modified architecture, or may occur because of modified architecture.

### Greenness Index

[0159] The “greenness index” as used herein is calculated from digital images of plants. For each pixel belonging to the plant object on the image, the ratio of the green value versus the red value (in the RGB model for encoding color) is calculated. The greenness index is expressed as the percentage of pixels for which the green-to-red ratio exceeds a given threshold. Under normal growth conditions, under salt stress growth conditions, and under reduced nutrient availability growth conditions, the greenness index of plants is measured in the last imaging before flowering. In contrast, under drought stress growth conditions, the greenness index of plants is measured in the first imaging after drought.

### Plant

[0160] The term “plant” as used herein encompasses whole plants, ancestors and progeny of the plants and plant parts, including seeds, shoots, stems, leaves, roots (including tubers), flowers, and tissues and organs, wherein each of the aforementioned comprise the gene/nucleic acid of interest. The term “plant” also encompasses plant cells, suspension cultures, callus tissue, embryos, meristematic regions, gametophytes, sporophytes, pollen and microspores, again wherein each of the aforementioned comprises the gene/nucleic acid of interest.

[0161] Plants that are particularly useful in the methods of the invention include all plants which belong to the superfamily Viridiplantae, in particular monocotyledonous and dicotyledonous plants including fodder or forage legumes, ornamental plants, food crops, trees or shrubs selected from the list comprising Acer spp., Actinidia spp., Abelmoschus spp., Agave sisalana, Agropyron spp., Agrostis stolonifera, Allium spp., Amaranthus spp., Ammophila arenaria, Ananas comosus, Annona spp., Apium graveolens, Arachis spp, Artocarpus spp., Asparagus officinalis, Avena spp. (e.g. Avena sativa, Avena fatua, Avena byzantina, Avena fatua var. sativa, Avena hybrida), Averrhoa carambola, Bambusa sp., Benincasa hispida, Bertholletia excelsea, Beta vulgaris, Brassica spp. (e.g. Brassica napus, Brassica rapa ssp. [canola, oilseed rape, turnip rape]), Cadaba farinosa, Camellia sinensis, Canna indica, Cannabis sativa, Capsicum spp., Carex elata, Carica papaya, Carissa macrocarpa, Carya spp., Carthamus tinctorius, Castanea spp., Ceiba pentandra, Cichorium endivia, Cinnamomum spp., Citrullus lanatus, Citrus spp., Cocos spp., Coffea spp., Colocasia esculenta, Cola spp., Corchorus sp., Coriandrum sativum, Corylus spp., Crataegus spp., Crocus sativus, Cucurbita spp., Cucumis spp., Cynara spp., Daucus carota, Desmodium spp., Dimocarpus longan, Dioscorea spp., Diospyros spp., Echinochloa spp., Elaeis (e.g. Elaeis guineensis, Elaeis oleifera), Eleusine coracana, Erianthus sp., Eriobotrya japonica, Eucalyptus sp., Eugenia uniflora, Fagopyrum spp., Fagus spp., Festuca arundinacea, Ficus carica, Fortunella spp., Fragaria spp., Ginkgo biloba, Glycine spp. (e.g. Glycine max, Soja hispida or Soja max), Gossypium hirsutum, Helianthus spp. (e.g. Helianthus annuus), Hemerocallis fulva, Hibiscus spp., Hordeum spp. (e.g. Hordeum vulgare), Ipomoea batatas, Juglans spp., Lactuca sativa, Lathyrus spp., Lens culinaris, Linum usitatissimum, Litchi chinensis, Lotus spp., Luffa acutangula, Lupinus spp., Luzula sylvatica, Lycopersicon spp. (e.g. Lycopersicon esculentum, Lycopersicon lycopersicum, Lycopersicon pyriforme), Macrotyloma spp., Malus spp., Malpighia emarginata, Mammea americana, Mangifera indica, Manihot spp., Manilkara zapota, Medicago sativa, Melilotus spp., Mentha spp., Miscanthus sinensis, Momordica spp., Morus nigra, Musa spp., Nicotiana spp., Olea spp., Opuntia spp., Ornithopus spp., Oryza spp. (e.g. Oryza sativa, Oryza latifolia), Panicum miliaceum, Panicum virgatum, Passiflora edulis, Pastinaca sativa, Pennisetum sp., Persea spp., Petroselinum crispum, Phalaris arundinacea, Phaseolus spp., Phleum pratense, Phoenix spp., Phragmites australis, Physalis spp., Pinus spp., Pistacia vera, Pisum spp., Poa spp., Populus spp., Prosopis spp., Prunus spp., Psidium spp., Punica granatum, Pyrus communis, Quercus spp., Raphanus sativus, Rheum rhabarbarum, Ribes spp., Ricinus communis, Rubus spp., Saccharum spp., Salix sp., Sambucus spp., Secale cereale, Sesamum spp., Sinapis sp., Solanum spp. (e.g. Solanum tuberosum, Solanum integrifolium or Solanum lycopersicum), Sorghum bicolor, Spinacia spp., Syzygium spp., Tagetes spp., Tamarindus indica, Theobroma cacao, Trifolium spp., Triticosecale rimpaui, Triticum spp. (e.g. Triticum aestivum, Triticum durum, Triticum turgidum, Triticum hybernum, Triticum macha, Triticum sativum or Triticum vulgare), Tropaeolum minus, Tropaeolum majus, Vaccinium spp., Vicia spp., Vigna spp., Viola odorata, Vitis spp., Zea mays, Zizania palustris, Ziziphus spp., amongst others.

### DETAILED DESCRIPTION OF THE INVENTION

### Detailed Description for the Ankyrin-Zn Finger Polypeptide

[0162] Surprisingly, it has now been found that modulating expression in a plant of a nucleic acid encoding the AZ polypeptide from Arabidopsis (AtAZ) or a homologue thereof gives plants having increased yield relative to control plants. According to one embodiment of the present invention, there is provided a method for increasing plant yield, comprising modulating expression in a plant of a nucleic acid encoding the AZ polypeptide or a homologue thereof. Advantageously, performance of the methods according to the present invention results in plants having increased yield, particularly seed yield, relative to corresponding wild type plants.

[0163] A “reference”, “reference plant”, “control”, “control plant”, “wild type” or “wild type plant” is in particular a cell, a tissue, an organ, a plant, or a part thereof, which was not produced according to the method of the invention. Accordingly, the terms “wild type”, “control” or “reference” are exchangeable and can be a cell or a part of the plant such as an organelle or tissue, or a plant, which was not modified or treated according to the herein described method according to the invention. Accordingly, the cell or a part of the plant such as an organelle or a plant used as wild type, control or reference corresponds to the cell, plant or part thereof as much as possible and is in any other property but in the result of the process of the invention as identical to the subject matter of the invention as possible. Thus, the wild type, control or reference is treated identically or as identical as possible, saying that only conditions or properties might be different which do not influence the quality of the tested property. That means in other words that the wild type denotes (1) a plant, which carries the unaltered or not modulated form of a gene or allele or (2) the starting material/plant from which the plants produced by the process or method of the invention are derived.

[0164] Preferably, any comparison between the wild type plants and the plants produced by the method of the invention is carried out under analogous conditions. The term “analogous conditions” means that all conditions such as, for example, culture or growing conditions, assay conditions (such as buffer composition, temperature, substrates, pathogen strain, concentrations and the like) are kept identical between the experiments to be compared.

[0165] The “reference”, “control”, or “wild type” is preferably a subject, e.g. an organelle, a cell, a tissue, a plant, which was not modulated, modified or treated according to the herein described process of the invention and is in any other property as similar to the subject matter of the invention as possible. The reference, control or wild type is in its genome, transcriptome, proteome or metabolome as similar as possible to the subject of the present invention. Preferably, the term “reference-” “control-” or “wild type-”-organelle, -cell, -tissue or plant, relates to an organelle, cell, tissue or plant, which is nearly genetically identical to the organelle, cell, tissue or plant, of the present invention or a part thereof preferably 95%, more preferred are 98%, even more preferred are 99,00%, in particular 99,10%, 99,30%, 99,50%, 99,70%, 99,90%, 99,99%, 99, 999% or more. Most preferably the “reference”, “control”, or “wild type” is a subject, e.g. an organelle, a cell, a tissue, a plant, which is genetically identical to the plant, cell organelle used according to the method of the invention except that nucleic acid molecules or the gene product encoded by them are changed, modulated or modified according to the inventive method.

[0166] The term “expression” or “gene expression” is as defined herein, preferably it results in the appearance of a phenotypic trait as a consequence of the transcription of a specific gene or specific genes.

[0167] The increase referring to the activity of the polypeptide amounts in a cell, a tissue, a organelle, an organ or an organism or a part thereof preferably to at least 5%, preferably to at least 10% or at to least 15%, especially preferably to at least 20%, 25%, 30% or more, very especially preferably are to at least 40%, 50% or 60%, most preferably are to at least 70% or more in comparison to the control, reference or wild type.

[0168] The term “increased yield” as defined herein is taken to mean an increase in biomass (weight) of one or more parts of a plant, which may include aboveground (harvestable) parts and/or (harvestable) parts below ground. In a preferred embodiment, the increased yield is increased seed yield.

[0169] Therefore, such harvestable parts are preferably seeds, and performance of the methods of the invention results in plants having increased seed yield relative to the seed yield of control plants.

[0170] An increase in seed yield may also be manifested as an increase in seed size and/or seed volume, which may also influence the composition of seeds (including oil, protein and carbohydrate total content and composition).

[0171] Taking corn as an example, a yield increase may be manifested as one or more of the following: increase in the number of plants per square meter, an increase in the number of ears per plant, an increase in the number of rows, number of kernels per row, kernel weight, thousand kernel weight, ear length/diameter, increase in seed filling rate (which is the number of filled seeds divided by the total number of seeds and multiplied by 100), among others. Taking rice as an example, a yield increase may be manifested by an increase in one or more of the following: number of plants per square meter, number of panicles per plant, number of spikelets per panicle, number of flowers (florets) per panicle (which is expressed as a ratio of the number of filled seeds over the number of primary panicles), increase in the seed filling rate, (which is the number of filled seeds divided by the total number of seeds and multiplied by 100), increase in thousand kernel weight, among others. An increase in yield may also result in modified architecture, or may occur as a result of modified architecture.

[0172] According to a preferred feature, performance of the methods of the invention result in plants having increased yield, particularly seed yield. Therefore, according to the present invention, there is provided a method for increasing plant yield, which method comprises modulating expression in a plant of a nucleic acid encoding the AZ polypeptide or a homologue thereof.

[0173] Since the transgenic plants according to the present invention have increased yield, it is likely that these plants exhibit an increased growth rate (during at least part of their life cycle), relative to the growth rate of control plants at a corresponding stage in their life cycle. The increased growth rate may be specific to one or more parts of a plant (including seeds), or may be throughout substantially the whole plant. Plants having an increased growth rate may have a shorter life cycle. The life cycle of a plant may be taken to mean the time needed to grow from a dry mature seed up to the stage where the plant has produced dry mature seeds, similar to the starting material. This life cycle may be influenced by factors such as early vigour, growth rate, greenness index, flowering time and speed of seed maturation. The increase in growth rate may take place at one or more stages in the life cycle of a plant or during substantially the whole plant life cycle. Increased growth rate during the early stages in the life cycle of a plant may reflect enhanced vigour. The increase in growth rate may alter the harvest cycle of a plant allowing plants to be sown later and/or harvested sooner than would otherwise be possible (a similar effect may be obtained with earlier flowering time). If the growth rate is sufficiently increased, it may allow for the further sowing of seeds of the same plant species (for example sowing and harvesting of rice plants followed by sowing and harvesting of further rice plants all within one conventional growing period). Similarly, if the growth rate is sufficiently increased, it may allow for the further sowing of seeds of different plants species (for example the planting and harvesting of corn plants followed by, for example, the planting and optional harvesting of soy bean, potato or any other suitable plant). Harvesting additional times from the same rootstock in the case of some crop plants may also be possible. Altering the harvest cycle of a plant may lead to an increase in annual biomass production per square meter (due to an increase in the number of times (say in a year) that any particular plant may be grown and harvested). An increase in growth rate may also allow for the cultivation of transgenic plants in a wider geographical area than their wild-type counterparts, since the territorial limitations for growing a crop are often determined by adverse environmental conditions either at the time of planting (early season) or at the time of harvesting (late season). Such adverse conditions may be avoided if the harvest cycle is shortened. The growth rate may be determined by deriving various parameters from growth curves, such parameters may be: T-Mid (the time taken for plants to reach 50% of their maximal size) and T-90 (time taken for plants to reach 90% of their maximal size), amongst others.

[0174] According to a preferred feature of the present invention, performance of the methods of the invention gives plants having an increased growth rate or increased yield in comparison to control plants. Therefore, according to the present invention, there is provided a method for increasing yield and/or growth rate in plants, which method comprises modulating expression in a plant of a nucleic acid encoding the AZ polypeptide or a homologue thereof.

[0175] An increase in yield and/or growth rate occurs whether the plant is under non-stress conditions or whether the plant is exposed to various stresses compared to control plants. Plants typically respond to exposure to stress by growing more slowly. In conditions of severe stress, the plant may even stop growing altogether. Mild stress on the other hand is defined herein as being any stress to which a plant is exposed which does not result in the plant ceasing to grow altogether without the capacity to resume growth. Mild stress in the sense of the invention leads to a reduction in the growth of the stressed plants of less than 40%, 35% or 30%, preferably less than 25%, 20% or 15%, more preferably less than 14%, 13%, 12%, 11% or 10% or less in comparison to the control plant under non-stress conditions. Due to advances in agricultural practices (irrigation, fertilization, pesticide treatments) severe stresses are not often encountered in cultivated crop plants. As a consequence, the compromised growth induced by mild stress is often an undesirable feature for agriculture. Mild stresses are the everyday biotic and/or abiotic (environmental) stresses to which a plant is exposed. Abiotic stresses may be due to drought or excess water, anaerobic stress, salt stress, chemical toxicity, oxidative stress and hot, cold or freezing temperatures. The abiotic stress may be an osmotic stress caused by a water stress (particularly due to drought), salt stress, oxidative stress or an ionic stress. Biotic stresses are typically those stresses caused by pathogens, such as bacteria, viruses, fungi and insects.

[0176] In particular, the methods of the present invention may be performed under non-stress conditions or under conditions of mild drought to give plants having increased yield relative to control plants. As reported in Wang et al. (Planta (2003) 218: 1-14), abiotic stress leads to a series of morphological, physiological, biochemical and molecular changes that adversely affect plant growth and productivity. Drought, salinity, extreme temperatures and oxidative stress are known to be interconnected and may induce growth and cellular damage through similar mechanisms. Rabbani et al. (Plant Physiol (2003) 133: 1755-1767) describes a particularly high degree of “cross talk” between drought stress and high-salinity stress. For example, drought and/or salinisation are manifested primarily as osmotic stress, resulting in the disruption of homeostasis and ion distribution in the cell. Oxidative stress, which frequently accompanies high or low temperature, salinity or drought stress, may cause denaturing of functional and structural proteins. As a consequence, these diverse environmental stresses often activate similar cell signaling pathways and cellular responses, such as the production of stress proteins, up-regulation of anti-oxidants, accumulation of compatible solutes and growth arrest. The term “non-stress” conditions as used herein are those environmental conditions that do not impose stress, such as the stresses described above, on plants. Non-stress conditions allow optimal growth of plants. Persons skilled in the art are aware of normal soil conditions and climatic conditions for a given location.

[0177] Performance of the methods of the invention gives plants grown under non-stress conditions or under mild drought conditions increased yield relative to control plants grown under comparable conditions. Therefore, according to the present invention, there is provided a method for increasing yield in plants grown under non-stress conditions or under mild drought conditions, which method comprises increasing expression in a plant of a nucleic acid encoding a AZ polypeptide.

[0178] In a preferred embodiment of the invention, the increase in yield and/or growth rate occurs according to the methods of the present invention under non-stress conditions.

[0179] Performance of the methods of the invention gives plants grown under conditions of nutrient deficiency, particularly under conditions of nitrogen deficiency, increased yield relative to control plants grown under comparable conditions. Therefore, according to the present invention, there is provided a method for increasing yield in plants grown under conditions of nutrient deficiency, which method comprises increasing expression in a plant of a nucleic acid encoding a AZ polypeptide. Nutrient deficiency may result from a lack of nutrients such as nitrogen, phosphates and other phosphorous-containing compounds, potassium, calcium, cadmium, magnesium, manganese, iron and boron, amongst others.

[0180] The methods of the invention are advantageously applicable to any plant. The abovementioned growth characteristics may advantageously be modified in any plant. Plants that are particularly useful in the methods of the invention include all plants which belong to the superfamily Viridiplantae, in particular monocotyledonous and dicotyledonous plants including fodder or forage legumes, ornamental plants, food crops, trees or shrubs. According to a preferred embodiment of the present invention, the plant is a crop plant. Examples of crop plants include soybean, sunflower, canola, alfalfa, rapeseed, cotton, tomato, potato and tobacco. Further preferably, the plant is a monocotyledonous plant. Examples of monocotyledonous plants include sugarcane. More preferably the plant is a cereal. Examples of cereals include rice, maize, wheat, barley, millet, rye, triticale, sorghum and oats.

[0181] Other advantageous plants are selected from the group consisting of Asteraceae such as the genera Helianthus, Tagetes e.g. the species Helianthus annuus [sunflower], Tagetes lucida, Tagetes erecta or Tagetes tenuifolia [Marigold]; Brassicaceae such as the genus Brassica, e.g. the species Brassica napus, Brassica rapa ssp. [canola, oilseed rape, turnip rape]; Fabaceae such as the genera Glycine e.g. the species Glycine max, Soja hispida or Soja max [soybean]; Linaceae such as the genera Linum e.g. the species Linum usitatissimum, [flax, linseed]; Poaceae such as the genera Hordeum, Secale, Avena, Sorghum, Oryza, Zea, Triticum e.g. the species Hordeum vulgare [barley], Secale cereale [rye], Avena sativa, Avena fatua, Avena byzantina, Avena fatua var. sativa, Avena hybrida [oat], Sorghum bicolor [sorghum, millet], Oryza sativa, Oryza latifolia [rice], Zea mays [corn, maize] Triticum aestivum, Triticum durum, Triticum turgidum, Triticum hybernum, Triticum macha, Triticum sativum or Triticum vulgare [wheat, bread wheat, common wheat]; Solanaceae such as the genera Solanum, Lycopersicon e.g. the species Solanum tuberosum [potato], Lycopersicon esculentum, Lycopersicon lycopersicum, Lycopersicon pyriforme, Solanum integrifolium or Solanum lycopersicum [tomato].

[0182] The term “AtAZ polypeptide or a homologue thereof” as defined herein refers to proteins that comprise at least one ankyrin repeat and at least one Zinc-finger C3H1 domain, which ankyrin repeat is located upstream of the C3H1 domain. Preferably, the AZ protein comprises two ankyrin repeats and two Zinc-finger C3H1 domains such as in the protein represented in SEQ ID NO: 2. Also preferably, the two ankyrin repeats are located close to each other. Further preferably, the Zinc-finger C3H1 domains are also located close to each other and C-terminally of the ankyrin repeats. In SEQ ID NO: 2, the ankyrin repeats are located on positions D90 to R120 and D125 to L157, the two Zn-finger domains are located on positions H301 to V327 and Q336 to P359 (FIG. 1).

[0183] Also preferably, the AtAZ protein comprises at least one of the following consensus sequences:

(motif 1, SEQ ID NO: 3)
(P/A)CSRAY(S/T)HDWTEC
(motif 2, SEQ ID NO: 4)
HPGENARRRDPR
(motif 3, SEQ ID NO: 5)
HG(V/I)FE(C/S)WLHP(A/S)QY(R/K)TRLCK
(motif 4, SEQ ID NO: 6)
CFFAH

[0184] Preferably motif 1 is PCSRAYSHDWTEC, and motif 3 is preferably HGVFECWLHPAQYRTRLCK.

[0185] More preferably, the AtAZ protein comprises two of the above-mentioned motifs, especially preferably 3 of the above-mentioned motifs, most preferably all four motifs.

[0186] The ankyrin repeat (SMART SM00248, Interpro IPR002110), as described in the Interpro database, is one of the most common protein-protein interaction motifs in nature. Ankyrin repeats are (usually tandemly) repeated modules of usually about 33 amino acids. They occur in a large number of functionally diverse proteins mainly from eukaryotes. The few known examples from prokaryotes and viruses may be the result of horizontal gene transfers. The repeat has been found in proteins of diverse function such as transcriptional initiators, cell-cycle regulators, cytoskeletal, ion transporters and signal transducers. The ankyrin fold appears to be defined by its structure rather than its function since there is no specific sequence or structure which is universally recognised by it. The conserved fold of the ankyrin repeat unit is known from several crystal and solution structures. Each repeat folds into a helix-loop-helix structure with a beta-hairpin/loop region projecting out from the helices at a 90° angle. The repeats stack together to form an L-shaped structure.

[0187] The Zinc-finger domain ZnF_C3H1 (also known as Znf_CCCH, SMART SM00356; Interpro IPR000571), as described in the Interpro database is thought to be involved in DNA-binding. Zinc fingers exist as different types, depending on the positions of the cysteine residues. Proteins containing zinc finger domains of the C-x8-C-x5-C-x3-H type (wherein x represents any amino acid and the digits 8, 5 and 3 represent the number of amino acids between the conserved C or H residues) include zinc finger proteins from eukaryotes involved in cell cycle or growth phase-related regulation, e.g. human TIS11B (butyrate response factor 1), a probable regulatory protein involved in regulating the response to growth factors, and the mouse TTP growth factor-inducible nuclear protein, which has the same function. The mouse TTP protein is induced by growth factors. Another protein containing this domain is the human splicing factor U2AF 35 kD subunit, which plays a critical role in both constitutive and enhancer-dependent splicing by mediating essential protein-protein interactions and protein-RNA interactions required for 3′ splice site selection. It has been shown that different CCCH zinc finger proteins interact with the 3′ untranslated region of various mRNA. This type of zinc finger is very often present in two copies.

[0188] FIG. 2 describes the consensus sequences as defined in the SMART database for the ankyrin domain and the zinc-finger domain; however it should be noted that these consensus sequences might be biased towards animal protein sequences.

[0189] The terms “domain” and “motif” are defined in the “definitions” section herein. Specialist databases exist for the identification of domains. The C3H1 or ankyrin domain in a AZ protein may be identified using, for example, SMART (Schultz et al. (1998) Proc. Natl. Acad. Sci. USA 95, 5857-5864; Letunic et al. (2002) Nucleic Acids Res 30, 242-244), InterPro (Mulder et al., (2003) Nucl. Acids. Res. 31, 315-318), Prosite (Bucher and Bairoch (1994), A generalized profile syntax for biomolecular sequences motifs and its function in automatic sequence interpretation. (In) ISMB-94; Proceedings 2nd International Conference on Intelligent Systems for Molecular Biology. Altman R., Brutlag D., Karp P., Lathrop R., Searls D., Eds., pp 53-61, AAAIPress, Menlo Park; Hulo et al., Nucl. Acids. Res. 32:D134-D137, (2004)) or Pfam (Bateman et al., Nucleic Acids Research 30(1): 276-280 (2002)). A set of tools for in silico analysis of protein sequences is available on the ExPASY proteomics server (hosted by the Swiss Institute of Bioinformatics (Gasteiger et al., ExPASy: the proteomics server for in-depth protein knowledge and analysis, Nucleic Acids Res. 31:3784-3788 (2003)). The AZ protein sequence was analysed with the SMART tool (version 4.1; Schultz et al. (1998) Proc. Natl. Acad. Sci. USA 95, 5857-5864; Letunic et al. (2002) Nucleic Acids Res 30, 242-244) and was used to screen the Pfam (Version 17.0, March 2005; Bateman et al. (2004) Nucl. Acids Res. 32, D138-141) and InterPro database (Release 11.0, 26 Jul. 2005; Mulder et al. (2005) Nucl. Acids. Res. 33, D201-205).

[0190] By aligning other protein sequences with SEQ ID NO: 2, the corresponding consensus sequences, the C3H1 domain, the ankyrin domain or other sequence motifs may easily be identified. In this way, AZ polypeptides or homologues thereof (encompassing orthologues and paralogues) may readily be identified, using routine techniques well known in the art, such as by sequence alignment. Methods for the alignment of sequences for comparison are well known in the art, such methods include GAP, BESTFIT, BLAST, FASTA and TFASTA. GAP uses the algorithm of Needleman and Wunsch ((1970) J Mol Biol 48: 443-453) to find the alignment of two complete sequences that maximizes the number of matches and minimizes the number of gaps. The BLAST algorithm (Altschul et al. (1990) J Mol Biol 215: 403-10) calculates percent sequence identity and performs a statistical analysis of the similarity between the two sequences. The software for performing BLAST analysis is publicly available through the National Centre for Biotechnology Information. Homologues may readily be identified using, for example, the ClustalW multiple sequence alignment algorithm (version 1.83), with the default pairwise alignment parameters, and a scoring method in percentage. Global percentages of similarity and identity may also be determined using one of the methods available in the MatGAT software package (Campanella et al., BMC Bioinformatics. 2003 Jul. 10; 4:29. MatGAT: an application that generates similarity/identity matrices using protein or DNA sequences.). Minor manual editing may be performed to optimise alignment between conserved motifs, as would be apparent to a person skilled in the art. Furthermore, instead of using full-length sequences for the identification of homologues, specific domains (such as the C3H1 or ankyrin domain, or one of the motifs defined above) may be used as well. The sequence identity values, which are indicated below as a percentage were determined over the entire conserved domain or nucleic acid or amino acid sequence using the programs mentioned above using the default parameters.

[0191] Examples of AZ proteins or homologues thereof include the protein sequences listed in Table A of Example 1.

[0192] It is to be understood that sequences falling under the definition of “AZ polypeptide or homologue thereof” are not to be limited to the polypeptide sequences listed in Table A of Example 1, but that any polypeptide comprising at least one ankyrin repeat, and at least one C3H1 zinc finger domain and preferably also at least one of the consensus sequence of SEQ ID NO: 3, 4, 5 or 6 as defined above, may be suitable for use in the methods of the invention. Preferably, the polypeptide is a polypeptide from Arabidopsis thaliana.

[0193] Encompassed by the term “homologues” are orthologous sequences and paralogous sequences. Orthologues and paralogues may be found by performing a so-called reciprocal blast search. This may be done by a first BLAST involving BLASTing a query sequence (for example, SEQ ID NO: 1 or SEQ ID NO: 2) against any sequence database, such as the publicly available NCBI database. BLASTN or TBLASTX (using standard default values) may be used when starting from a nucleotide sequence and BLASTP or TBLASTN (using standard default values) may be used when starting from a protein sequence. The BLAST results may optionally be filtered. The full-length sequences of either the filtered results or non-filtered results are then BLASTed back (second BLAST) against sequences from the organism from which the query sequence is derived (where the query sequence is SEQ ID NO: 1 or SEQ ID NO: 2, the second BLAST would therefore be against Arabidopsis sequences). The results of the first and second BLASTs are then compared. A paralogue is identified if a high-ranking hit from the second BLAST is from the same species as from which the query sequence is derived; an orthologue is identified if a high-ranking hit is not from the same species as from which the query sequence is derived. Preferred orthologues are orthologues of SEQ ID NO: 1 or SEQ ID NO: 2. High-ranking hits are those having a low E-value. The lower the E-value, the more significant the score (or in other words the lower the chance that the hit was found by chance). Computation of the E-value is well known in the art. In addition to E-values, comparisons are also scored by percentage identity. Percentage identity refers to the number of identical nucleotides (or amino acids) between the two compared nucleic acid (or polypeptide) sequences over a particular length. Preferably the score is greater than 50, more preferably greater than 100; and preferably the E-value is less than e-5, more preferably less than e-6. In the case of large families, ClustalW may be used, followed by the generation of a neighbour joining tree, to help visualize clustering of related genes and to identify orthologues and paralogues. Examples of sequences orthologous to SEQ ID NO: 2 include SEQ ID NO: 11, SEQ ID NO: 15 and SEQ ID NO: 17. SEQ ID NO: 19 is an example of a paralogue of SEQ ID NO: 2.

[0194] Preferably, the AZ proteins useful in the methods of the present invention have, besides at least one ankyrin repeat and at least one C3H1 domain, in increasing order of preference, at least 26%, 30%, 35%, 40%, 45%, 50%, 55%, 60%, 65%, 70%, 75%, 80%, 85%, 90%, 95%, 96%, 97%, 98% or 99% sequence identity to the protein of SEQ ID NO: 2. The matrix shown in FIG. 3 (Matrix A) shows similarities and identities (in bold) over the full-length of various AZ proteins. In case only specific domains are compared, the identity or similarity may be higher among the different proteins (Matrix B: comparison of a Zn-finger domain sequence).

[0195] An assay may be carried out to determine AZ activity. DNA-binding activity and protein-protein interactions may readily be determined in vitro or in vivo using techniques well known in the art. Examples of in vitro assays for DNA binding activity include: gel retardation analysis or yeast one-hybrid assays. An example of an in vitro assay for protein-protein interactions is the yeast two-hybrid analysis (Fields and Song (1989) Nature 340:245-6).

[0196] Furthermore, expression of the AZ protein or of a homologue thereof in plants, and in particular in rice, has the effect of increasing yield of the transgenic plant when compared to corresponding wild type plants, wherein increased yield comprises at least one of: total weight of seeds, total number of seeds and number of filled seeds.

[0197] An AZ polypeptide or homologue thereof is encoded by an AZ nucleic acid/gene. Therefore the term “AZ nucleic acid/gene” as defined herein is any nucleic acid/gene encoding an AZ polypeptide or a homologue thereof as defined above. Examples of AZ nucleic acids include but are not limited to those represented in Table A of Example 1. AZ nucleic acids/genes and variants thereof may be suitable in practising the methods of the invention. Preferably, the variants of an AZ gene originate from Arabidopsis thaliana. Variant AZ nucleic acid/genes include portions of an AZ nucleic acid/gene, splice variants, allelic variants and/or nucleic acids capable of hybridising with an AZ nucleic acid/gene.

[0198] Reference herein to a “nucleic acid sequence” is taken to mean a polymeric form of a deoxyribonucleotide or a ribonucleotide polymer of any length, either double- or single-stranded, or analogues thereof, that has the essential characteristic of a natural ribonucleotide in that it can hybridise to nucleic acid sequences in a manner similar to naturally occurring polynucleotides.

[0199] The term portion as defined herein refers to a piece of DNA encoding a polypeptide comprising at least one ankyrin repeat and at least one C3H1 Zn-finger domain. A portion may be prepared, for example, by making one or more deletions to an AZ nucleic acid. The portions may be used in isolated form or they may be fused to other coding (or non-coding) sequences in order to, for example, produce a protein that combines several activities. When fused to other coding sequences, the resulting polypeptide produced upon translation may be bigger than that predicted for the AZ fragment. The portion is typically at least 500, 700 or 900 nucleotides in length, preferably at least 1100, 1300 or 1500 nucleotides in length, more preferably at least 1700, 1900 or 2100 nucleotides in length and most preferably at least 2300 or 2400 nucleotides in length. Preferably, the portion is a portion of a nucleic acid as represented in Table A of Example 1. Most preferably the portion of an AZ nucleic acid is as represented by SEQ ID NO: 1 or SEQ ID NO: 53.

[0200] The terms “fragment”, “fragment of a sequence” or “part of a sequence” “portion” or “portion thereof” mean a truncated sequence of the original sequence referred to. The truncated sequence (nucleic acid or protein sequence) can vary widely in length; the minimum size being a sequence of sufficient size to provide a sequence with at least a comparable function and/or activity of the original sequence referred to or hybridising with the nucleic acid molecule of the invention or used in the process of the invention under stringent conditions, while the maximum size is not critical. In some applications, the maximum size usually is not substantially greater than that required to provide the desired activity and/or function(s) of the original sequence. A comparable function means at least 40%, 45% or 50%, preferably at least 60%, 70%, 80% or 90% or more of the function of the original sequence.

[0201] Another variant of an AZ nucleic acid/gene is a nucleic acid capable of hybridising under reduced stringency conditions, preferably under stringent conditions, with an AZ nucleic acid/gene as hereinbefore defined or with a portion as hereinbefore defined. The hybridizing sequence is typically at least 300 nucleotides in length, preferably at least 400 nucleotides in length, more preferably at least 500 nucleotides in length and most preferably at least 600 nucleotides in length.

[0202] Preferably, the hybridising sequence is one that is capable of hybridising to a nucleic acid as represented by SEQ ID NO: 1, SEQ ID NO: 10, SEQ ID NO: 12, SEQ ID NO: 14, SEQ ID NO: 16, SEQ ID NO: 18, SEQ ID NO: 20, SEQ ID NO: 22, SEQ ID NO: 24, SEQ ID NO: 26, SEQ ID NO: 28, SEQ ID NO: 30, SEQ ID NO: 32, SEQ ID NO: 34, SEQ ID NO: 36, SEQ ID NO: 38, SEQ ID NO: 40, SEQ ID NO: 42 or SEQ ID NO: 53, or to a portion of any of the aforementioned sequences, a portion being defined as above. Most preferably the hybridising sequence is capable of hybridising to SEQ ID NO: 1, to SEQ ID NO: 53, or to portions (or probes) thereof. Methods for designing probes are well known in the art. Probes are generally less than 1000 bp, 900 bp, 800 bp, 700 bp, 600 by in length, preferably less than 500 bp, 400 bp, 300 by 200 by or 100 by in length. Commonly, probe lengths for DNA-DNA hybridizations such as Southern blotting, vary between 100 and 500 bp, whereas the hybridizing region in probes for DNA-DNA hybridizations such as in PCR amplification generally are shorter than 50 but longer than 10 nucleotides, preferably they are 15, 20, 25, 30, 35, 40, 45 or 50 by in length.

[0203] Also useful in the methods of the invention are nucleic acids encoding homologues (including orthologues or paralogues) of the amino acid sequence represented by SEQ ID NO: 2, or derivatives thereof.

[0204] Another nucleic acid variant useful in the methods of the present invention is a splice variant encoding an AZ polypeptide as defined above. Preferred splice variants are splice variants of the nucleic acid encoding a polypeptide comprising at least on ankyrin repeat and at least one C3H1 domain. Preferably, the AZ polypeptide or the homologue thereof encoded by the splice variant has at least 26%, 30%, 35%, 40%, 45%, 50%, 55%, 60%, 65%, 70%, 75%, 80%, 85%, 90%, 95%, 96%, 97%, 98% or 99% sequence identity to SEQ ID NO: 2. Further preferred are splice variants represented by the nucleic acids represented in Table A of Example 1. For example, SEQ ID NO: 25 and SEQ ID NO: 47 are encoded by splice variants of the same gene. Most preferred is the splice variant represented by SEQ ID NO: 1 or SEQ ID NO: 53.

[0205] Another nucleic acid variant useful in the methods of the present invention is an allelic variant of a nucleic acid encoding an AZ polypeptide as defined above. Preferably, the polypeptide encoded by the allelic variant is represented by the polypeptide sequences listed in Table A of Example 1. Most preferably, the allelic variant encoding the AZ polypeptide is represented by SEQ ID NO: 1.

[0206] A further nucleic acid variant useful in the methods of the invention is a nucleic acid variant obtained by gene shuffling. Furthermore, site-directed mutagenesis may be used to generate variants of AZ nucleic acids. Several methods are available to achieve site-directed mutagenesis; the most common being PCR based methods (Current Protocols in Molecular Biology. Wiley Eds.).

[0207] Therefore, the invention provides a method for increasing yield and/or growth rate of a plant, comprising modulating expression in a plant of a variant of an AZ nucleic acid selected from:
[0208] (i) a portion of an AZ nucleic acid;
[0209] (ii) a nucleic acid hybridising to an AZ nucleic acid;
[0210] (iii) a splice variant of a nucleic acid encoding an AZ polypeptide;
[0211] (iv) an allelic variant of a nucleic acid encoding an AZ polypeptide; and
[0212] (v) a nucleic acid variant encoding an AZ polypeptide obtained by gene shuffling or site directed mutagenesis.

[0213] The AZ nucleic acid or variant thereof may be derived from any natural or artificial source. This nucleic acid may be modified from its native form in composition and/or genomic environment through deliberate human manipulation. The nucleic acid is preferably of plant origin, further preferably from a dicotyledonous species, further preferably from the family Brassicaceae, more preferably from Arabidopsis thaliana. Most preferably, the AZ nucleic acid is the Arabidopsis thaliana sequence represented by SEQ ID NO: 1, and the AZ amino acid sequence is as represented by SEQ ID NO: 2. Alternatively, the AZ nucleic acid represented by SEQ ID NO: 53 or the AZ amino acid sequence as represented by SEQ ID NO: 47 may also be useful in the methods of the present invention.

[0214] Any reference herein to an AZ polypeptide is therefore taken to mean an AZ protein as defined above. Any nucleic acid encoding such an AZ protein is suitable for use in the methods of the invention.

[0215] According to a preferred aspect of the present invention, modulated, preferably increased expression of the AZ nucleic acid or variant thereof is envisaged. Methods for increasing the expression of genes or gene products are well documented in the art. The expression of a nucleic acid sequence encoding an AZ polypeptide may be modulated by introducing a genetic modification, which may be introduced, for example, by any one (or more) of the following methods: T-DNA activation, TILLING, site-directed mutagenesis, directed evolution and homologous recombination or by introducing and expressing in a plant a nucleic acid encoding an AZ polypeptide or a homologue thereof. Following introduction of the genetic modification, there follows a step of selecting for modified expression of a nucleic acid encoding an AZ polypeptide or a homologue thereof, which modification in expression gives plants having increased yield. Also methods for decreasing the expression of genes or gene products are known in the art.

[0216] T-DNA activation is described above. A genetic modification may also be introduced in the locus of an AZ gene using the technique of TILLING (Targeted Induced Local Lesions In Genomes). The locus of a gene as defined herein is taken to mean a genomic region, which includes the gene of interest and 10 kb up- or down stream of the coding region. Site-directed mutagenesis may be used to generate variants of AZ nucleic acids. Several methods are available to achieve site-directed mutagenesis; the most common being PCR based methods (Current Protocols in Molecular Biology. Wiley Eds.). The effects of the invention may also be produced using homologous recombination.

[0217] A preferred method for introducing a genetic modification is to introduce and express in a plant a nucleic acid encoding an AZ polypeptide or a homologue thereof, as defined above. The nucleic acid to be introduced into a plant may be a full-length nucleic acid or may be a portion or a hybridising sequence as hereinbefore defined.

[0218] The invention furthermore provides genetic constructs and vectors to facilitate introduction and/or expression of the nucleotide sequences useful in the methods according to the invention.

[0219] Therefore, there is provided a gene construct comprising:
[0220] (i) an AZ nucleic acid or variant thereof, as defined hereinabove;
[0221] (ii) one or more control sequences operably linked the nucleic acid sequence of (i);

[0222] Constructs useful in the methods according to the present invention may be created using recombinant DNA technology well known to persons skilled in the art. The gene constructs may be inserted into vectors, which may be commercially available, suitable for transforming into plants and suitable for expression of the gene of interest in the transformed cells. The invention therefore provides use of a gene construct as defined hereinabove in the methods of the invention.

[0223] Plants are transformed with a vector comprising the sequence of interest (i.e., a nucleic acid encoding an AZ polypeptide or homologue thereof). The skilled artisan is well aware of the genetic elements that must be present on the vector in order to successfully transform, select and propagate host cells containing the sequence of interest. The sequence of interest is operably linked to one or more control sequences (at least to a promoter). The terms “regulatory element”, “control sequence” and “promoter” are defined above. Advantageously, any type of promoter may be used to drive expression of the nucleic acid sequence.

[0224] Suitable promoters, which are functional in plants, are generally known. They may take the form of constitutive or inducible promoters. Suitable promoters can enable the developmental- and/or tissue-specific expression in multi-cellular eukaryotes; thus, leaf-, root-, flower-, seed-, stomata-, tuber- or fruit-specific promoters may advantageously be used in plants.

[0225] Different plant promoters usable in plants are promoters such as, for example, the USP, the LegB4-, the DC3 promoter or the ubiquitin promoter from parsley.

[0226] A “plant” promoter comprises regulatory elements, which mediate the expression of a coding sequence segment in plant cells. Accordingly, a plant promoter need not be of plant origin, but may originate from viruses or micro-organisms, in particular for example from viruses which attack plant cells.

[0227] The “plant” promoter can also originate from a plant cell, e.g. from the plant which is transformed with the nucleic acid sequence to be expressed in the inventive process and described herein. This also applies to other “plant” regulatory signals, for example in “plant” terminators.

[0228] For expression in plants, the nucleic acid molecule must, as described above, be linked operably to or comprise a suitable promoter which expresses the gene at the right point in time and in a cell- or tissue-specific manner. Useful promoters are constitutive promoters (Benfey et al., EMBO J. 8 (1989) 2195-2202), such as those which originate from plant viruses, such as 35S CAMV (Franck et al., Cell 21 (1980) 285-294), 19S CaMV (see also U.S. Pat. No. 5,352,605 and WO 84/02913), 34S FMV (Sanger et al., Plant. Mol. Biol., 14, 1990: 433-443), the parsley ubiquitin promoter, or plant promoters such as the Rubisco small subunit promoter described in U.S. Pat. No. 4,962,028 or the plant promoters PRP1 [Ward et al., Plant. Mol. Biol. 22 (1993)], SSU, PGEL1, OCS [Leisner (1988) Proc Natl Acad Sci USA 85(5): 2553-2557], lib4, usp, mas [Comai (1990) Plant Mol Biol 15 (3):373-381], STLS1, ScBV (Schenk (1999) Plant Mol Biol 39(6):1221-1230), B33, SAD1 or SAD2 (flax promoters, Jain et al., Crop Science, 39 (6), 1999: 1696-1701) or nos [Shaw et al. (1984) Nucleic Acids Res. 12(20):7831-7846]. Further examples of constitutive plant promoters are the sugar beet V-ATPase promoters (WO 01/14572). Examples of synthetic constitutive promoters are the Super promoter (WO 95/14098) and promoters derived from G-boxes (WO 94/12015). If appropriate, chemically inducible promoters may furthermore also be used, compare EP-A 388186, EP-A 335528, WO 97/06268. Stable, constitutive expression of the proteins according to the invention a plant can be advantageous. However, inducible expression of the polypeptide of the invention is advantageous, if, for example, late expression before the harvest is of advantage, as metabolic manipulation may lead to plant growth retardation.

[0229] The expression of plant genes can also be facilitated via a chemically inducible promoter. Chemically inducible promoters are particularly suitable when it is desired to express the gene in a time-specific manner. Examples of such promoters are a salicylic acid inducible promoter (WO 95/19443), and abscisic acid-inducible promoter (EP 335 528), a tetracyclin-inducible promoter (Gatz et al. (1992) Plant J. 2, 397-404), a cyclohexanol- or ethanol-inducible promoter (WO 93/21334) or others as described herein.

[0230] Other suitable promoters are those which react to biotic or abiotic stress conditions, for example the pathogen-induced PRP1 gene promoter (Ward et al., Plant. Mol. Biol. 22 (1993) 361-366), the tomato heat-inducible hsp80 promoter (U.S. Pat. No. 5,187,267), the potato chill-inducible alpha-amylase promoter (WO 96/12814) or the wound-inducible pinII promoter (EP-A-0 375 091) or others as described herein.

[0231] Preferred promoters are in particular those which bring gene expression in tissues and organs, in seed cells, such as endosperm cells and cells of the developing embryo. Suitable promoters are the oilseed rape napin gene promoter (U.S. Pat. No. 5,608,152), the Vicia faba USP promoter (Baeumlein et al., Mol Gen Genet, 1991, 225 (3): 459-67), the Arabidopsis oleosin promoter (WO 98/45461), the Phaseolus vulgaris phaseolin promoter (U.S. Pat. No. 5,504,200), the Brassica Bce4 promoter (WO 91/13980), the bean arcs promoter, the carrot DcG3 promoter, or the Legumin B4 promoter (LeB4; Baeumlein et al., 1992, Plant Journal, 2 (2): 233-9), and promoters which bring about the seed-specific expression in monocotyledonous plants such as maize, barley, wheat, rye, rice and the like. Advantageous seed-specific promoters are the sucrose binding protein promoter (WO 00/26388), the phaseolin promoter and the napin promoter. Suitable promoters which must be considered are the barley Ipt2 or Ipt1 gene promoter (WO 95/15389 and WO 95/23230), and the promoters described in WO 99/16890 (promoters from the barley hordein gene, the rice glutelin gene, the rice oryzin gene, the rice prolamin gene, the wheat gliadin gene, the wheat glutelin gene, the maize zein gene, the oat glutelin gene, the sorghum kasirin gene and the rye secalin gene). Further suitable promoters are Amy32b, Amy 6-6 and Aleurain [U.S. Pat. No. 5,677,474], Bce4 (oilseed rape) [U.S. Pat. No. 5,530,149], glycinin (soya) [EP 571 741], phosphoenolpyruvate carboxylase (soya) [JP 06/62870], ADR12-2 (soya) [WO 98/08962], isocitrate lyase (oilseed rape) [U.S. Pat. No. 5,689,040] or α-amylase (barley) [EP 781 849]. Other promoters which are available for the expression of genes in plants are leaf-specific promoters such as those described in DE-A 19644478 or light-regulated promoters such as, for example, the pea petE promoter.

[0232] Further suitable plant promoters are the cytosolic FBPase promoter or the potato ST-LSI promoter (Stockhaus et al., EMBO J. 8, 1989, 2445), the Glycine max phosphoribosylpyrophosphate amidotransferase promoter (GenBank Accession No. U87999) or the node-specific promoter described in EP-A-0 249 676.

[0233] According to one preferred feature of the invention, the AZ nucleic acid or variant thereof is operably linked to a seed-specific promoter. The seed-specific promoter may be active during seed development and/or during germination. Seed-specific promoters are well known in the art. Preferably, the seed-specific promoter is an embryo specific/endosperm specific/aleurone specific promoter. Further preferably, the seed-specific promoter drives expression in at least one of: the embryo, the endosperm, the aleurone. More preferably, the promoter is a WSI18 or a functionally equivalent promoter. Most preferably, the promoter sequence is as represented by SEQ ID NO: 9 or SEQ ID NO: 55. It should be clear that the applicability of the present invention is not restricted to the AZ nucleic acid represented by SEQ ID NO: 1 or SEQ ID NO: 53, nor is the applicability of the invention restricted to expression of an AZ nucleic acid when driven by a seed-specific promoter. Examples of other seed-specific promoters (embryo specific/endosperm specific/aleurone specific promoters) which may also be used to drive expression of an AZ nucleic acid are provided above.

[0234] According to another preferred feature of the invention, the AZ nucleic acid or variant thereof is operably linked to a constitutive promoter. A preferred constitutive promoter is a constitutive promoter that is also substantially ubiquitously expressed. Further preferably the promoter is derived from a plant, more preferably a monocotyledonous plant. An example of such a promoter is the GOS2 promoter from rice (SEQ ID NO: 54 or SEQ ID NO: 56). It should be clear that the applicability of the present invention is not restricted to the AZ nucleic acid represented by SEQ ID NO: 1, nor is the applicability of the invention restricted to expression of a AZ nucleic acid when driven by a constitutive promoter, and in particular by a GOS2 promoter. Examples of other constitutive promoters which may also be used to drive expression of an AZ nucleic acid are shown above.

[0235] Optionally, one or more terminator sequences may be used in the construct introduced into a plant. Additional regulatory elements may include transcriptional as well as translational enhancers. Those skilled in the art will be aware of terminator and enhancer sequences that may be suitable for use in performing the invention. An intron sequence may also be added to the 5′ untranslated region (UTR) or in the coding sequence to increase the amount of the mature message that accumulates in the cytosol, as described in the definitions section. Other control sequences (besides promoter, enhancer, silencer, intron sequences, 3′UTR and/or 5′UTR regions) may be protein and/or RNA stabilizing elements. Such sequences would be known or may readily be obtained by a person skilled in the art.

[0236] The genetic constructs of the invention may further include an origin of replication sequence that is required for maintenance and/or replication in a specific cell type. One example is when a genetic construct is required to be maintained in a bacterial cell as an episomal genetic element (e.g. plasmid or cosmid molecule). Preferred origins of replication include, but are not limited to, the f1-ori and colE1.

[0237] For the detection of the successful transfer of the nucleic acid sequences as used in the methods of the invention and/or selection of transgenic plants comprising these nucleic acids, it is advantageous to use marker genes (or reporter genes). Therefore, the genetic construct may optionally comprise a selectable marker gene. Selectable markers are described in more detail in the “definitions” section herein. The marker genes may be removed or excised from the transgenic cell once they are no longer needed. Techniques for marker removal are known in the art, useful techniques are described above in the definitions section.

[0238] The present invention also encompasses plants, plant parts or plant cells obtainable by the methods according to the present invention. The present invention therefore provides plants obtainable by the method according to the present invention, which plants have introduced therein an AZ nucleic acid or variant thereof, as defined above.

[0239] The invention also provides a method for the production of transgenic plants having increased yield, comprising introduction and expression in a plant of an AZ nucleic acid or a variant thereof as defined above.

[0240] Host plants for the nucleic acids or the vector used in the method according to the invention, the expression cassette or construct or vector are, in principle, advantageously all plants, which are capable of synthesizing the polypeptides used in the inventive method.

[0241] More specifically, the present invention provides a method for the production of transgenic plants having increased yield, which method comprises:
[0242] (i) introducing and expressing in a plant or plant cell an AZ nucleic acid or variant thereof; and
[0243] (ii) cultivating the plant cell under conditions promoting plant growth and development.

[0244] The nucleic acid may be introduced directly into a plant cell or into the plant itself (including introduction into a tissue, organ or any other part of a plant). According to a preferred feature of the present invention, the nucleic acid is preferably introduced into a plant by transformation. The terms “introduction” or “transformation” are described in more detail in the definitions section.

[0245] Generally after transformation, plant cells or cell groupings are selected for the presence of one or more markers which are encoded by plant-expressible genes co-transferred with the gene of interest, following which the transformed material is regenerated into a whole plant.

[0246] As mentioned, Agrobacteria transformed with an expression vector according to the invention may also be used in the manner known per se for the transformation of plants such as plants used as a model, like Arabidopsis (Arabidopsis thaliana is within the scope of the present invention not considered as a crop plant), or crop plants, such as cereals, maize, oats, rye, barley, wheat, soybean, rice, cotton, sugar beet, canola, sunflower, flax, hemp, potato, tobacco, tomato, carrot, bell peppers, oilseed rape, tapioca, cassaya, arrow root, tagetes, alfalfa, lettuce and the various tree, nut, and grapevine species, in particular oil-containing crop plants such as soy, peanut, castor-oil plant, sunflower, maize, cotton, flax, oilseed rape, coconut, oil palm, safflower (Carthamus tinctorius) or cocoa beans, for example by bathing scarred leaves or leaf segments in an agrobacterial solution and subsequently culturing them on suitable media.

[0247] The genetically modified plant cells can be regenerated via all methods with which the skilled worker is familiar. Suitable methods can be found in the abovementioned publications by S.D. Kung and R. Wu, Potrykus or Hofgen and Willmitzer.

[0248] Generally after transformation, plant cells or cell groupings are selected for the presence of one or more markers which are encoded by plant-expressible genes co-transferred with the gene of interest, following which the transformed material is regenerated into a whole plant. To select transformed plants, the plant material obtained in the transformation is, as a rule, subjected to selective conditions so that transformed plants can be distinguished from untransformed plants. For example, the seeds obtained in the above-described manner can be planted and, after an initial growing period, subjected to a suitable selection by spraying. A further possibility consists in growing the seeds, if appropriate after sterilization, on agar plates using a suitable selection agent so that only the transformed seeds can grow into plants. Alternatively, the transformed plants are screened for the presence of a selectable marker such as the ones described above.

[0249] Following DNA transfer and regeneration, putatively transformed plants may be evaluated, for instance using Southern analysis, for the presence of the gene of interest, copy number and/or genomic organisation. Alternatively or additionally, expression levels of the newly introduced DNA may be monitored using Northern and/or Western analysis, both techniques being well known to persons having ordinary skill in the art.

[0250] The generated transformed plants may be propagated by a variety of means, such as by clonal propagation or classical breeding techniques. For example, a first generation (or T1) transformed plant may be selfed and homozygous second-generation (or T2) transformants selected, and the T2 plants may then further be propagated through classical breeding techniques.

[0251] The generated transformed organisms may take a variety of forms. For example, they may be chimeras of transformed cells and non-transformed cells; clonal transformants (e.g., all cells transformed to contain the expression cassette); grafts of transformed and untransformed tissues (e.g., in plants, a transformed rootstock grafted to an untransformed scion).

[0252] The present invention clearly extends to any plant cell or plant produced by any of the methods described herein, and to all plant parts and propagules thereof. The present invention extends further to encompass the progeny of a primary transformed or transfected cell, tissue, organ or whole plant that has been produced by any of the aforementioned methods, the only requirement being that progeny exhibit the same genotypic and/or phenotypic characteristic(s) as those produced by the parent in the methods according to the invention. The invention also includes host cells containing an isolated AZ nucleic acid or variant thereof. Preferred host cells according to the invention are plant cells. The invention also extends to harvestable parts of a plant such as, but not limited to seeds, leaves, fruits, flowers, stem, roots, rhizomes, tubers and bulbs. The invention furthermore relates to products directly derived from a harvestable part of such a plant, such as dry pellets or powders, oil, fat and fatty acids, starch or proteins.

[0253] The present invention also encompasses use of AZ nucleic acids or variants thereof and use of AZ polypeptides or homologues thereof.

[0254] One such use relates to improving the growth characteristics of plants, in particular in improving yield, especially seed yield. The increased seed yield preferably comprises increased thousand kernel weight.

[0255] Nucleic acids encoding AZ polypeptides may find use in breeding programmes in which a DNA marker is identified which may be genetically linked to an AZ gene. The nucleic acids/genes may be used to define a molecular marker. This DNA or protein marker may then be used in breeding programmes to select plants having increased yield.

[0256] Allelic variants of an AZ nucleic acid/gene may also find use in marker-assisted breeding programmes. Such breeding programmes sometimes require introduction of allelic variation by mutagenic treatment of the plants, using for example EMS mutagenesis; alternatively, the programme may start with a collection of allelic variants of so called “natural” origin caused unintentionally. Identification of allelic variants then takes place, for example, by PCR. This is followed by a step for selection of superior allelic variants of the sequence in question and which give increased yield. Selection is typically carried out by monitoring growth performance of plants containing different allelic variants of the sequence in question, for example, different allelic variants of any one of the nucleic acids listed in Table A of Example 1. Growth performance may be monitored in a greenhouse or in the field. Further optional steps include crossing plants, in which the superior allelic variant was identified, with another plant. This could be used, for example, to make a combination of interesting phenotypic features.

[0257] An AZ nucleic acid may also be used as probes for genetically and physically mapping the genes that they are a part of, and as markers for traits linked to those genes. Such information may be useful in plant breeding in order to develop lines with desired phenotypes. Such use of AZ nucleic acids or variants thereof requires only a nucleic acid sequence of at least 15 nucleotides in length. The AZ nucleic acids or variants thereof may be used as restriction fragment length polymorphism (RFLP) markers. Southern blots (Sambrook J, Fritsch EF and Maniatis T (1989) Molecular Cloning, A Laboratory Manual) of restriction-digested plant genomic DNA may be probed with the AZ nucleic acids. The resulting banding patterns may then be subjected to genetic analyses using computer programs such as MapMaker (Lander et al. (1987) Genomics 1: 174-181) in order to construct a genetic map. In addition, the nucleic acids may be used to probe Southern blots containing restriction endonuclease-treated genomic DNAs of a set of individuals representing parent and progeny of a defined genetic cross. Segregation of the DNA polymorphisms is noted and used to calculate the position of the AZ nucleic acid in the genetic map previously obtained using this population (Botstein et al. (1980) Am. J. Hum. Genet. 32: 314-331).

[0258] The production and use of plant gene-derived probes for use in genetic mapping is described in Bernatzky and Tanksley (1986) Plant Mol. Biol. Reporter 4: 37-41. Numerous publications describe genetic mapping of specific cDNA clones using the methodology outlined above or variations thereof. For example, F2 intercross populations, backcross populations, randomly mated populations, near isogenic lines, and other sets of individuals may be used for mapping. Such methodologies are well known to those skilled in the art.

[0259] The nucleic acid probes may also be used for physical mapping (i.e., placement of sequences on physical maps; see Hoheisel et al. In: Non-mammalian Genomic Analysis: A Practical Guide, Academic press 1996, pp. 319-346, and references cited therein). In another embodiment, the nucleic acid probes may be used in direct fluorescence in situ hybridization (FISH) mapping (Trask (1991) Trends Genet. 7:149-154). Although current methods of FISH mapping favour use of large clones (several kb to several hundred kb; see Laan et al. (1995) Genome Res. 5:13-20), improvements in sensitivity may allow performance of FISH mapping using shorter probes.

[0260] A variety of nucleic acid amplification-based methods for genetic and physical mapping may be carried out using the nucleic acids. Examples include allele-specific amplification (Kazazian (1989) J. Lab. Clin. Med 11:95-96), polymorphism of PCR-amplified fragments (CAPS; Sheffield et al. (1993) Genomics 16:325-332), allele-specific ligation (Landegren et al. (1988) Science 241:1077-1080), nucleotide extension reactions (Sokolov (1990) Nucleic Acid Res. 18:3671), Radiation Hybrid Mapping (Walter et al. (1997) Nat. Genet. 7:22-28) and Happy Mapping (Dear and Cook (1989) Nucleic Acid Res. 17:6795-6807). For these methods, the sequence of a nucleic acid is used to design and produce primer pairs for use in the amplification reaction or in primer extension reactions. The design of such primers is well known to those skilled in the art. In methods employing PCR-based genetic mapping, it may be necessary to identify DNA sequence differences between the parents of the mapping cross in the region corresponding to the instant nucleic acid sequence. This, however, is generally not necessary for mapping methods.

[0261] The methods according to the present invention result in plants having increased yield, as described hereinbefore. These advantageous growth characteristics may also be combined with other economically advantageous traits, such as further yield-enhancing traits, tolerance to various stresses, traits modifying various architectural features and/or biochemical and/or physiological features.

### Detailed Description for the SYT Polypeptide

[0262] Surprisingly, it has now been found that modulating expression of a nucleic acid sequence encoding a SYT polypeptide increases plant yield and/or early vigour under abiotic stress relative to control plants. Therefore, according to the present invention, there is provided a method for increasing plant yield and/or early vigour under abiotic stress relative to control plants, comprising modulating expression in a plant of a nucleic acid sequence encoding a SYT polypeptide.

[0263] Reference herein to “control plants” is taken to mean any suitable control plant or plants.

[0264] The “reference”, “control”, or “wild type” are used herein interchangeably and is preferably a subject, e.g. an organelle, a cell, a tissue, a plant, which is as similar to the subject matter of the invention as possible. The reference, control or wild type is in its genome, transcriptome, proteome or metabolome as similar as possible to the subject of the present invention. Preferably, the term “reference-” “control-” or “wild type-”-organelle, -cell, -tissue or plant, relates to an organelle, cell, tissue or plant, which is nearly genetically identical to the organelle, cell, tissue or plant, of the present invention or to a part thereof, having in increasing order of preference 95%, 98%, 99.00%, 99.10%, 99.30%, 99.50%, 99.70%, 99.90%, 99.99%, 99, 999% or more genetic identity to the organelle, cell, tissue or plant, of the present invention. Most preferable the “reference”, “control”, or “wild type” is preferably a subject, e.g. an organelle, a cell, a tissue, a plant, which is genetically identical to the plant, tissue, cell, organelle used according to the method of the invention except that the nucleic acid sequences or the gene product in question is changed, modulated or modified according to the inventive method.

[0265] Preferably, any comparison between the control plants and the plants produced by the method of the invention is carried out under analogous conditions. The term “analogous conditions” means that all conditions such as culture or growing conditions, assay conditions (such as buffer composition, temperature, substrates, pathogen strain, concentrations and the like) are kept identical between the experiments to be compared.

[0266] Any reference hereinafter to a “protein useful in the methods of the invention” is taken to mean a SYT polypeptide as defined herein. Any reference hereinafter to a “nucleic acid useful in the methods of the invention” is taken to mean a nucleic acid capable of encoding such a SYT polypeptide. The nucleic acid to be introduced into a plant (and therefore useful in performing the methods of the invention) is any nucleic acid encoding the type of protein which will now be described, hereafter also named “SYT nucleic acid” or “SYT gene”.

[0267] The term “sequence” relates to polynucleotides, nucleic acids, nucleic acid molecules, peptides, polypeptides and proteins, depending on the context in which the term “sequence” is used. A “coding sequence” is a nucleic acid sequence, which is transcribed into mRNA and/or translated into a polypeptide when placed under the control of appropriate regulatory sequences. The boundaries of the coding sequence are determined by a translation start codon at the 5′-terminus and a translation stop codon at the 3′-terminus. A coding sequence can include, but is not limited to mRNA, cDNA, recombinant nucleic acid sequences or genomic DNA, while introns may be present as well under certain circumstances. The term “expression” or “gene expression” is as defined above. The term “modulation” is defined above and means in relation to expression or gene expression, an increase in expression.

[0268] The term “SYT polypeptide” as defined herein refers to a polypeptide comprising from N-terminal to C-terminal: (i) an SNH domain having in increasing order of preference at least 20%, 25%, 30%, 35%, 40%, 45%, 50%, 55%, 60%, 65%, 70%, 75%, 80%, 85%, 90%, 91%, 92%, 93%, 94%, 95%, 96%, 97%, 98%, 99% sequence identity to the SNH domain of SEQ ID NO: 58; and (ii) a Met-rich domain; and (iii) a QG-rich domain. Preferably, the SNH domain comprises the residues shown in black in FIG. 6. Further preferably, the SNH domain is as represented by SEQ ID NO: 57.

[0269] Additionally, the SYT polypeptide may comprise one or more of the following: (a) SEQ ID NO: 146; (b) SEQ ID NO: 147; and (c) a Met-rich domain at the N-terminal preceding the SNH domain.

[0270] A SYT polypeptide is encoded by a SYT nucleic acid sequence. Therefore the term “SYT nucleic acid sequence” as defined herein is any nucleic acid sequence encoding a SYT polypeptide as defined hereinabove.

[0271] The terms “motif” and “domain” are defined in the definitions section. Specialist databases exist for the identification of domains, for example, SMART (Schultz et al. (1998) Proc. Natl. Acad. Sci. USA 95, 5857-5864; Letunic et al. (2002) Nucleic Acids Res 30, 242-244), InterPro (Mulder et al., (2003) Nucl. Acids. Res. 31, 315-318), Prosite (Bucher and Bairoch (1994), A generalized profile syntax for biomolecular sequences motifs and its function in automatic sequence interpretation. (In) ISMB-94; Proceedings 2nd International Conference on Intelligent Systems for Molecular Biology. Altman R., Brutlag D., Karp P., Lathrop R., Searls D., Eds., pp 53-61, AAAI Press, Menlo Park; Hulo et al., Nucl. Acids. Res. 32:D134-D137, (2004)), or Pfam (Bateman et al., Nucleic Acids Research 30(1): 276-280 (2002)). A set of tools for in silico analysis of protein sequences is available on the ExPASy proteomics server (Swiss Institute of Bioinformatics (Gasteiger et al., ExPASy: the proteomics server for in-depth protein knowledge and analysis, Nucleic Acids Res. 31:3784-3788 (2003)). Domains or motifs may also be identified using routine techniques, such as by sequence alignment.

[0272] SYT polypeptides may readily be identified using routine techniques well known in the art, such as by sequence alignment. Methods for the alignment of sequences for comparison are well known in the art, such methods include GAP, BESTFIT, BLAST, FASTA and TFASTA. GAP uses the algorithm of Needleman and Wunsch ((1970) J Mol Biol 48: 443-453) to find the alignment of two complete sequences that maximizes the number of matches and minimizes the number of gaps. The BLAST algorithm (Basic Local Alignment Search Tool; Altschul et al. (1990) J Mol Biol 215: 403-10) calculates percent sequence identity (%) and performs a statistical analysis of the similarity between the two sequences (E-value). Percentage identity refers to the number of identical nucleotides (or amino acids) between the two compared nucleic acid (or polypeptide) sequences over a particular length. The higher the similarity between two sequences, the lower the E-value (or in other words the lower the chance that the hit was found by chance). Computation of the E-value is well known in the art. The software for performing BLAST analysis is publicly available through the National Centre for Biotechnology Information. SYT polypeptides comprising an SNH domain having in increasing order of preference at least 20%, 25%, 30%, 35%, 40%, 45%, 50%, 55%, 60%, 65%, 70%, 75%, 80%, 85%, 90%, 91%, 92%, 93%, 94%, 95%, 96%, 97%, 98%, 99% sequence identity to the SNH domain of SEQ ID NO: 58 may be identified this way. Alternatively, SYT polypeptides useful in the methods of the present invention have, in increasing order of preference, at least 30%, 35%, 40%, 45%, 50%, 55%, 60%, 65%, 70%, 75%, 80%, 85%, 90%, 95%, 96%, 97%, 98% or 99% sequence identity to the polypeptide of SEQ ID NO: 60. Minor manual editing may be performed to optimise alignment between conserved motifs, as would be apparent to a person skilled in the art. In some instances, default parameters may be adjusted to modify the stringency of the search. For example using BLAST, the statistical significance threshold (called “expect” value) for reporting matches against database sequences may be increased to show less stringent matches. In this way, short nearly exact matches may be identified. The presence of SEQ ID NO: 146 and of SEQ ID NO: 147 both comprised in the SYT polypeptides useful in the methods of the invention may be identified this way.

[0273] Furthermore, the presence of a Met-rich domain or a QG-rich domain may also readily be identified. As shown in FIG. 7, the Met-rich domain and QG-rich domain follows the SNH domain. The QG-rich domain may be taken to be substantially the C-terminal remainder of the polypeptide (minus the SHN domain); the Met-rich domain is typically comprised within the first half of the QG-rich (from the N-term to the C-term). Primary amino acid composition (in %) to determine if a polypeptide domain is rich in specific amino acids may be calculated using software programs from the ExPASy server (Gasteiger E et al. (2003) ExPASy: the proteomics server for in-depth protein knowledge and analysis. Nucleic Acids Res 31:3784-3788), in particular the ProtParam tool. The composition of the polypeptide of interest may then be compared to the average amino acid composition (in %) in the Swiss-Prot Protein Sequence data bank (Table 5). Within this databank, the average Met (M) content is of 2.37%, the average Gln (Q) content is of 3.93% and the average Gly (G) content is of 6.93% (Table 5). As defined herein, a Met-rich domain or a QG-rich domain has Met content (in %) or a Gln and Gly content (in %) above the average amino acid composition (in %) in the Swiss-Prot Protein Sequence data bank. For example in SEQ ID NO: 60, the Met-rich domain at the N-terminal preceding the SNH domain (from amino acid positions 1 to 24) has Met content of 20.8% and a QG-rich domain (from amino acid positions 71 to 200) has a Gln (Q) content of 18.6% and a Gly (G) content of 21.4%. Preferably, the Met domain as defined herein has a Met content (in %) that is at least 1.25, 1.5, 1.75, 2.0, 2.25, 2.5, 2.75, 3.0, 3.25, 3.5, 3.75, 4.0, 4.25, 4.5, 4.75, 5.0, 5.25, 5.0, 5.75, 6.0, 6.25, 6.5, 6.75, 7.0, 7.25, 7.5, 7.75, 8.0, 8.25, 8.5, 8.75, 9.0, 9.25, 9.5, 9.75, 10 or more as the average amino acid composition (in %) of said kind of protein sequences, which are included in the Swiss-Prot Protein Sequence data bank. Preferably, the QG-rich domain as defined herein has a Gln (Q) content and/or a Gly (G) content that is at least 1.25, 1.5, 1.75, 2.0, 2.25, 2.5, 2.75, 3.0, 3.25, 3.5, 3.75, 4.0, 4.25, 4.5, 4.75, 5.0, 5.25, 5.0, 5.75, 6.0, 6.25, 6.5, 6.75, 7.0, 7.25, 7.5, 7.75, 8.0, 8.25, 8.5, 8.75, 9.0, 9.25, 9.5, 9.75, 10 or more as much as the average amino acid composition (in %) of said kind of protein sequences, which are included in the Swiss-Prot Protein Sequence data bank.

TABLE 5
Mean amino acid composition (%) of proteins in
SWISS PROT Protein Sequence data bank (July 2004):

| Residue | % |
|---|---|
| A = Ala | 7.80 |
| C = Cys | 1.57 |
| D = Asp | 5.30 |
| E = Glu | 6.59 |
| F = Phe | 4.02 |
| G = Gly | 6.93 |
| H = His | 2.27 |
| I = Ile | 5.91 |
| K = Lys | 5.93 |
| L = Leu | 9.62 |
| M = Met | 2.37 |
| N = Asn | 4.22 |
| P = Pro | 4.85 |
| Q = Gln | 3.93 |
| R = Arg | 5.29 |
| S = Ser | 6.89 |
| T = Thr | 5.46 |
| V = Val | 6.69 |
| W = Trp | 1.16 |
| Y = Tyr | 3.09 |

[0274] Examples of SYT polypeptides include (encoded by polynucleotide sequence accession number in parenthesis; see also Table 6 and mentioned in the sequence protocol): Arabidopsis thaliana Arath_SYT1 (AY102639.1) SEQ ID NO: 60, Arabidopsis thaliana Arath_SYT2 (AY102640.1) SEQ ID NO: 62, Arabidopsis thaliana Arath_SYT3 (AY102641.1) SEQ ID NO: 64, Aspergillus officinalis Aspof SYT (CV287542) SEQ ID NO: 66, Brassica napus Brana_SYT (CD823592) SEQ ID NO: 68, Citrus sinensis Citsi_SYT (CB290588) SEQ ID NO: 70, Gossypium arboreum GosarSYT (BM359324) SEQ ID NO: 72, Medicago trunculata MedtrSYT (CA858507.1) SEQ ID NO: 74, Oryza sativa Orysa_SYT1 (AK058575) SEQ ID NO: 76, Oryza sativa Orysa_SYT2 (AK105366) SEQ ID NO: 78, Oryza sativa Orysa_SYT3 (BP185008) SEQ ID NO: 80, Solanum tuberosum Soltu_SYT (BG590990) SEQ ID NO: 82, Zea mays Zeama_SYT1 (BG874129.1, CA409022.1) SEQ ID NO: 84, Zea mays Zeama_SYT2 (AY106697) SEQ ID NO: 86, Homo sapiens Homsa_SYT (CAG46900) SEQ ID NO: 88, Allium cepa Allce_SYT2 (CF437-485) SEQ ID NO: 90, Aquilegia formosa x Aquilegia pubescens Aqufo_SYT1 (DT758802) SEQ ID NO: 92, Brachypodium distachyon Bradi_SYT3 (DV480064) SEQ ID NO: 94, Brassica napus Brana_SYT2 (CN732814) SEQ ID NO: 96, Citrus sinensis Citsi_SYT2 (CV717501) SEQ ID NO: 98, Euphorbia esula Eupes_SYT2 (DV144834) SEQ ID NO: 100, Glycine max Glyma_SYT2 (BQ612648) SEQ ID NO: 102, Glycine soya Glyso_SYT2 (CA799921) SEQ ID NO: 104, Gossypium hirsutum Goshi_SYT1 (DT558852) SEQ ID NO: 106, Gossypium hirsutum Goshi_SYT2 (DT563805) SEQ ID NO: 108, Hordeum vulgare Horvu_SYT2 (CA032350) SEQ ID NO: 110, Lactuca serriola Lacse_SYT2 (DW110765) SEQ ID NO: 112, Lycopersicon esculentum Lyces_SYT1 (AW934450, BP893155) SEQ ID NO: 114, Malus domestica Maldo_SYT2 (CV084230, DR997566) SEQ ID NO: 116, Medicago trunculata MedtrSYT2 (CA858743, B1310799, AL382135) SEQ ID NO: 118, Panicum virgatum Panvi_SYT3 (DN152517) SEQ ID NO: 120, Picea sitchensis Picsi_SYT1 (DR484100, DR478-464) SEQ ID NO: 122, Pinus taeda Pinta_SYT1 (DT625916) SEQ ID NO: 124, Populus tremula Poptr_SYT1 (DT476906) SEQ ID NO: 126, Saccharum officinarum Sacof_SYT1 (CA078249, CA078630, CA082679, CA234526, CA239244, CA083312) SEQ ID NO: 128, Saccharum officinarum. Sacof_SYT2 (CA110367) SEQ ID NO: 130, Saccharum officinarum Sacof SYT3 (CA161933, CA265085) SEQ ID NO: 132, Solanum tuberosum Soltu_SYT1 (CK265597) SEQ ID NO: 134, Sorghum bicolor Sorbi_SYT3 (CX611128) SEQ ID NO: 136, Triticum aestivum Triae_SYT2 (CD901951) SEQ ID NO: 138, Triticum aestivum Triae_SYT3 (BJ246754, BJ252709) SEQ ID NO: 140, Vitis vinifera Vitvi_SYT1 (DV219834) SEQ ID NO: 142, Zea mays Zeama_SYT3 (C0468901) SEQ ID NO: 144, Brassica napus Brana_SYT SEQ ID NO: 151, Glycine max Glyma_SYT SEQ ID NO: 153.

TABLE 6
Examples of nucleic acid sequences encoding SYT polypeptides

| | NCBI | | | |
|---|---|---|---|---|
| | nucleotide | Nucleic acid | Translated | |
| | accession | sequence | polypeptide | |
| Name | number | SEQ ID NO | SEQ ID NO | Source |
| Arath_SYT1 | AY102639.1 | 59 | 60 | Arabidopsis thaliana |
| Arath_SYT2 | AY102640.1 | 61 | 62 | Arabidopsis thaliana |
| Arath_SYT3 | AY102641.1 | 63 | 64 | Arabidopsis thaliana |
| Aspof_SYT1 | CV287542 | 65 | 66 | Aspergillus officinalis |
| Brana_SYT1 | CD823592 | 67 | 68 | Brassica napus |
| Citsi_SYT1 | CB290588 | 69 | 70 | Citrus sinensis |
| Gosar_SYT1 | BM359324 | 71 | 72 | Gossypium arboreum |
| Medtr_SYT1 | CA858507.1 | 73 | 74 | Medicago trunculata |
| Orysa_SYT1 | AK058575 | 75 | 76 | Oryza sativa |
| Orysa_SYT2 | AK105366 | 77 | 78 | Oryza sativa |
| Orysa_SYT3 | BP185008 | 79 | 80 | Oryza sativa |
| Soltu_SYT2 | BG590990 | 81 | 82 | Solanum tuberosum |
| Zeama_SYT1 | BG874129.1 | 83 | 84 | Zea mays |
| | CA409022.1* | | | |
| Zeama_SYT2 | AY106697 | 85 | 86 | Zea mays |
| Homsa_SYT | CR542103 | 87 | 88 | Homo sapiens |
| Allce_SYT2 | CF437485 | 89 | 90 | Allium cepa |
| Aqufo_SYT1 | DT758802.1 | 91 | 92 | Aquilegia formosa × |
| | | | | Aquilegia pubescens |
| Bradi_SYT3 | DV480064.1 | 93 | 94 | Brachypodium distachyon |
| Brana_SYT2 | CN732814 | 95 | 96 | Brassica napa |
| Citsi_SYT2 | CV717501 | 97 | 98 | Citrus sinensis |
| Eupes_SYT2 | DV144834 | 99 | 100 | Euphorbia esula |
| Glyma_SYT2 | BQ612648 | 101 | 102 | Glycine max |
| Glyso_SYT2 | CA799921 | 103 | 104 | Glycine soya |
| Goshi_SYT1 | DT558852 | 105 | 106 | Gossypium hirsutum |
| Goshi_SYT2 | DT563805 | 107 | 108 | Gossypium hirsutum |
| Horvu_SYT2 | CA032350 | 109 | 110 | Hordeum vulgare |
| Lacse_SYT2 | DW110765 | 111 | 112 | Lactuca serriola |
| Lyces_SYT1 | AW934450.1 | 113 | 114 | Lycopersicon esculentum |
| | BP893155.1* | | | |
| Maldo_SYT2 | CV084230 | 115 | 116 | Malus domestica |
| | DR997566* | | | |
| Medtr_SYT2 | CA858743 | 117 | 118 | Medicago trunculata |
| | BI310799.1 | | | |
| | AL382135.1* | | | |
| Panvi_SYT3 | DN152517 | 119 | 120 | Panicum virgatum |
| Picsi_SYT1 | DR484100 | 121 | 122 | Picea sitchensis |
| | DR478464.1 | | | |
| Pinta_SYT1 | DT625916 | 123 | 124 | Pinus taeda |
| Poptr_SYT1 | DT476906 | 125 | 126 | Populus tremula |
| Sacof_SYT1 | CA078249.1 | 127 | 128 | Saccharum officinarum |
| | CA078630 | | | |
| | CA082679 | | | |
| | CA234526 | | | |
| | CA239244 | | | |
| | CA083312* | | | |
| Sacof_SYT2 | CA110367 | 129 | 130 | Saccharum officinarum |
| Sacof_SYT3 | CA161933.1 | 131 | 132 | Saccharum officinarum |
| | CA265085* | | | |
| Soltu_SYT1 | CK265597 | 133 | 134 | Solanum tuberosum |
| Sorbi_SYT3 | CX611128 | 135 | 136 | Sorghum bicolor |
| Triae_SYT2 | CD901951 | 137 | 138 | Triticum aestivum |
| Triae_SYT3 | BJ246754 | 139 | 140 | Triticum aestivum |
| | BJ252709* | | | |
| Vitvi_SYT1 | DV219834 | 141 | 142 | Vitis vinifera |
| Zeama_SYT3 | CO468901 | 143 | 144 | Zea mays |
| Brana_SYT | NA | 150 | 151 | Brassica napus |
| Glyma_SYT | NA | 152 | 153 | Glycine max |

*Compiled from cited accessions
NA: not available (proprietary)

[0275] Examples of nucleic acids encoding SYT polypeptides are given in Table 6 above. Such nucleic acids are useful in performing the methods of the invention. The amino acid sequences given in Table 6 above are example sequences of orthologues and paralogues of the SYT polypeptide represented by SEQ ID NO: 58, the terms “orthologues” and “paralogues” being as defined herein. Further orthologues and paralogues may readily be identified by performing a so-called reciprocal blast search. Typically, this involves a first BLAST involving BLASTing a query sequence (for example using any of the sequences listed in Table 6 above) against any sequence database, such as the publicly available NCB! database. BLASTN or TBLASTX (using standard default values) are generally used when starting from a nucleotide sequence, and BLASTP or TBLASTN (using standard default values) when starting from a protein sequence. The BLAST results may optionally be filtered. The full-length sequences of either the filtered results or non-filtered results are then BLASTed back (second BLAST) against sequences from the organism from which the query sequence is derived (where the query sequence is SEQ ID NO: 59 or SEQ ID NO: 60, the second BLAST would therefore be against Arabidopsis sequences). The results of the first and second BLASTs are then compared. A paralogue is identified if a high-ranking hit from the first blast is from the same species as from which the query sequence is derived, a BLAST back then ideally results in the query sequence amongst the highest hits; an orthologue is identified if a high-ranking hit in the first BLAST is not from the same species as from which the query sequence is derived, and preferably results upon BLAST back in the query sequence being among the highest hits.

[0276] High-ranking hits are those having a low E-value. The lower the E-value, the more significant the score (or in other words the lower the chance that the hit was found by chance). Computation of the E-value is well known in the art. In addition to E-values, comparisons are also scored by percentage identity. Percentage identity refers to the number of identical nucleotides (or amino acids) between the two compared nucleic acid (or polypeptide) sequences over a particular length. In the case of large families, ClustalW may be used, followed by a neighbour joining tree, to help visualize clustering of related genes and to identify orthologues and paralogues.

[0277] It is to be understood that sequences falling under the definition of a “SYT polypeptide” are not to be limited to the polypeptides given in Table 6 (and mentioned in the sequence protocol), but that any polypeptide comprising from N-terminal to C-terminal: (i) an SNH domain having at least 20%, 25%, 30%, 35%, 40%, 45%, 50%, 55%, 60%, 65%, 70%, 75%, 80%, 85%, 90%, 91%, 92%, 93%, 94%, 95%, 96%, 97%, 98%, 99% sequence identity to the SNH domain of SEQ ID NO: 58; and (ii) a Met-rich domain; and (iii) a QG-rich domain may be suitable in performing the methods of the invention. Preferably, the SNH domain comprises the residues shown in black in FIG. 6. Additionally, the SYT polypeptide may comprise one or more of the following: (a) SEQ ID NO: 146; (b) SEQ ID NO: 147; and (c) a Met-rich domain at the N-terminal preceding the SNH domain. Most preferably, the SYT polypeptide is as represented by SEQ ID NO: 60, SEQ ID NO: 151 or SEQ ID NO: 153.

[0278] A SYT polypeptide typically interacts with GRF (growth-regulating factor) polypeptides in yeast two-hybrid systems. Yeast two-hybrid interaction assays are well known in the art (see Field et al. (1989) Nature 340(6230): 245-246). For example, the SYT polypeptide as represented by SEQ ID NO: 4 is capable of interacting with AtGRF5 and with AtGRF9.

[0279] In a further embodiment the invention provides an isolated nucleic acid sequence comprising a nucleic acid sequence selected from the group consisting of:
[0280] (a) an isolated nucleic acid sequence as depicted in SEQ ID NO: 150 and SEQ ID NO: 152;
[0281] (b) an isolated nucleic acid sequence encoding the polypeptide as depicted in SEQ ID NO: 151 and SEQ ID NO: 153;
[0282] (c) an isolated nucleic acid sequence whose sequence can be deduced from a polypeptide as depicted in SEQ ID NO: 151 and SEQ ID NO: 153 as a result of the degeneracy of the genetic code;
[0283] (d) an isolated nucleic acid sequence which encodes a polypeptide which has at least 70% identity with the polypeptide encoded by the nucleic acid sequence of (a) to (c);
[0284] (e) an isolated nucleic acid sequence encoding a homologue, derivative or active fragment of the polypeptide as depicted in SEQ ID NO: 151 and SEQ ID NO: 153, which homologue, derivative or fragment is of plant origin and comprises advantageously from N-terminal to C-terminal:
   [0285] (i) an SNH domain having in increasing order of preference at least 20%, 25%, 30%, 35%, 40%, 45%, 50%, 55%, 60%, 65%, 70%, 75%, 80%, 85%, 90%, 91%, 92%, 93%, 94%, 95%, 96%, 97%, 98%, 99% sequence identity to the SNH domain of SEQ ID NO: 58;
   [0286] (ii) a Met-rich domain;
   [0287] (iii) a QG-rich domain;

[0288] (f) an isolated nucleic acid sequence capable of hybridising with a nucleic acid of (a) to (c) above, or its complement, wherein the hybridising sequence or the complement thereof encodes the plant protein of (a) to (e);

whereby modified expression of the nucleic acid sequence increases yield and/or early vigour in plants under abiotic stress compared to control plants.

[0289] The nucleic acid sequences encoding SYT polypeptides as given in Table 6, or orthologues or paralogues of any of the aforementioned SEQ ID NOs need not be full-length nucleic acid sequences, since performance of the methods of the invention does not rely on the use of full-length nucleic acid sequences.

[0290] SYT nucleic acid variants may also be suitable in practising the methods of the invention. Variant SYT nucleic acid sequences typically are those having the same function as a naturally occurring SYT nucleic acid sequence, which can be the same biological function or the function of increasing yield and/or early vigour when expression of the nucleic acid sequence is modulated in a plant under abiotic stress relative to control plants. Such variants include portions of a SYT nucleic acid sequence, splice variants of a SYT nucleic acid sequence, allelic variants of a SYT nucleic acid sequence, variants of a SYT nucleic acid sequence obtained by gene shuffling and/or nucleic acid sequences capable of hybridising with a SYT nucleic acid sequence as defined below. Preferably, the nucleic acid variant is a variant of a nucleic acid sequence is as represented by SEQ ID NO: 59, SEQ ID NO: 150 or SEQ ID NO: 152. The terms hybridising sequence, splice variant, allelic variant and gene shuffling are as described herein.

[0291] Nucleic acids encoding SYT polypeptides need not be full-length nucleic acids, since performance of the methods of the invention does not rely on the use of full-length nucleic acid sequences. According to the present invention, there is provided a method for enhancing yield and/or early vigour in plants under abiotic stress, comprising introducing and expressing in a plant a portion of any one of the nucleic acid sequences given in Table 6, or a portion of a nucleic acid encoding an orthologue, paralogue or homologue of any of the amino acid sequences given in Table 6.

[0292] The term portion as used herein refers to a piece of DNA encoding a polypeptide comprising from N-terminal to C-terminal: (i) an SNH domain having in increasing order of preference at least 20%, 25%, 30%, 35%, 40%, 45%, 50%, 55%, 60%, 65%, 70%, 75%, 80%, 85%, 90%, 91%, 92%, 93%, 94%, 95%, 96%, 97%, 98%, 99% sequence identity to the SNH domain of SEQ ID NO: 58 and (ii) a Met-rich domain; and (iii) a QG-rich domain. A portion may be prepared, for example, by making one or more deletions to a SYT nucleic acid sequence. The portions may be used in isolated form or they may be fused to other coding (or non coding) sequences in order to, for example, produce a polypeptide that combines several activities. When fused to other coding sequences, the resulting polypeptide produced upon translation may be bigger than that predicted for the SYT fragment. Preferably, the portion is a portion of a nucleic acid sequence as represented by any one given in Table 6, or orthologues or paralogues of any of the aforementioned SEQ ID NOs. Most preferably the portion is a portion of a nucleic acid sequence is as represented by SEQ ID NO: 59, SEQ ID NO: 150 or SEQ ID NO: 152.

[0293] Another variant of a SYT nucleic acid sequence is a nucleic acid sequence capable of hybridising under reduced stringency conditions, preferably under stringent conditions, with a SYT nucleic acid sequence as hereinbefore defined, which hybridising sequence encodes a SYT polypeptide or a portion as defined hereinabove.

[0294] According to the present invention, there is provided a method for enhancing yield and/or early vigour in plants under abiotic stress, comprising introducing and expressing in a plant a nucleic acid capable of hybridizing to any one of the nucleic acids given in Table 6, or comprising introducing and expressing in a plant a nucleic acid capable of hybridising to a nucleic acid encoding an orthologue, paralogue or homologue of any of the nucleic acid sequences given in Table 6.

[0295] Hybridising sequences useful in the methods of the invention encode a SYT polypeptide comprising from N-terminal to C-terminal: (i) an SNH domain having in increasing order of preference at least 20%, 25%, 30%, 35%, 40%, 45%, 50%, 55%, 60%, 65%, 70%, 75%, 80%, 85%, 90%, 91%, 92%, 93%, 94%, 95%, 96%, 97%, 98%, 99% sequence identity to the SNH domain of SEQ ID NO: 58 and (ii) a Met-rich domain; and (iii) a QG-rich domain. Preferably, the hybridising sequence is one that is capable of hybridising to a nucleic acid sequence as given in Table 6, or orthologues or paralogues of any of the aforementioned SEQ ID NOs, or to a portion of any of the aforementioned sequences as defined hereinabove. Most preferably the hybridizing sequence is one that is capable of hybridising to a nucleic acid sequence is as represented by SEQ ID NO: 59, SEQ ID NO: 150, SEQ ID NO: 152, or to portions (or probes) thereof. Methods for designing probes are well known in the art. Probes are generally less than 1000 by in length, preferably less than 500 by in length. Commonly, probe lengths for DNA-DNA hybridisations such as Southern blotting, vary between 100 and 500 bp, whereas the hybridising region in probes for DNA-DNA hybridisations such as in PCR amplification generally are shorter than 50 but longer than 10 nucleotides. The hybridising sequence is typically at least 100, 125, 150, 175, 200 or 225 nucleotides in length, preferably at least 250, 275, 300, 325, 350, 375, 400, 425, 450 or 475 nucleotides in length, further preferably least 500, 525, 550, 575, 600, 625, 650, 675, 700 or 725 nucleotides in length, or as long as a full length SYT cDNA.

[0296] Another nucleic acid variant useful in the methods of the invention is a splice variant encoding a SYT polypeptide as defined hereinabove. Preferred splice variants are splice variants of the SYT nucleic acid sequences as given in Table 6, or orthologues or paralogues of any of the aforementioned SEQ ID NOs. Most preferred is a splice variant of a SYT nucleic acid sequence as represented by SEQ ID NO: 59, SEQ ID NO: 150 or SEQ ID NO: 152.

[0297] According to the present invention, there is provided a method for enhancing yield and/or early vigour in plants under abiotic stress, comprising introducing and expressing in a plant a splice variant of any one of the nucleic acid sequences given in Table 6, or a splice variant of a nucleic acid encoding an orthologue, paralogue or homologue of any of the amino acid sequences given in Table 6.

[0298] Another nucleic acid variant useful in performing the methods of the invention is an allelic variant of a nucleic acid encoding a SYT polypeptide as defined hereinabove. Allelic variants exist in nature, and encompassed within the methods of the present invention is the use of these natural alleles. Preferred allelic variants are allelic variants of the SYT nucleic acid sequences as given in Table 6, or orthologues or paralogues of any of the aforementioned SEQ ID NOs. Most preferred is a splice variant of a SYT nucleic acid sequence as represented by SEQ ID NO: 59.

[0299] According to the present invention, there is provided a method for enhancing yield and/or early vigour in plants under abiotic stress, comprising introducing and expressing in a plant an allelic variant of any one of the nucleic acids given in Table 6, or comprising introducing and expressing in a plant an allelic variant of a nucleic acid encoding an orthologue, paralogue or homologue of any of the amino acid sequences given in Table 6.

[0300] A further nucleic acid variant useful in the methods of the invention is a nucleic acid variant encoding a SYT polypeptide obtained by gene shuffling (or directed evolution).

[0301] Another nucleic acid variant useful in the methods of the invention is a nucleic acid variant encoding a SYT polypeptide obtained by site-directed mutagenesis. Site-directed mutagenesis may be used to generate variants of SYT nucleic acid sequences. Several methods are available to achieve site-directed mutagenesis, the most common being PCR based methods (Current Protocols in Molecular Biology. Wiley Eds).

[0302] According to the present invention, there is provided a method for enhancing yield and/or early vigour in plants under abiotic stress, comprising introducing and expressing in a plant a variant of any one of the nucleic acid sequences given in Table 6, or comprising introducing and expressing in a plant a variant of a nucleic acid encoding an orthologue, paralogue or homologue of any of the amino acid sequences given in Table 6, which variant nucleic acid is obtained by gene shuffling or site-directed mutagenesis.

[0303] The following SYT nucleic acid variants are examples of variants suitable in practising the methods of the invention:
[0304] (i) a portion of a SYT nucleic acid sequence;
[0305] (ii) a nucleic acid sequence capable of hybridising with a SYT nucleic acid sequence;
[0306] (iii) a splice variant of a SYT nucleic acid sequence;
[0307] (iv) an allelic variant of a SYT nucleic acid sequence;
[0308] (v) a SYT nucleic acid sequence obtained by gene shuffling;
[0309] (vi) a SYT nucleic acid sequence obtained by site-directed mutagenesis.

[0310] Also useful in the methods of the invention are nucleic acids encoding homologues of SYT polypeptides as given in Table 6, or orthologues or paralogues of any of the aforementioned SEQ ID NOs.

[0311] Also useful in the methods of the invention are nucleic acids encoding derivatives of any one of the SYT nucleic acid sequences as given in Table 6, or orthologues or paralogues of any of the aforementioned SEQ ID NOs. Derivatives of orthologues or paralogues of any of the aforementioned SEQ ID NOs are further examples that may be suitable for use in the methods of the invention.

[0312] SYT nucleic acid sequences may be derived from any artificial source or natural source, such as plants, algae, fungi or animals. The nucleic acid sequence may be modified from its native form in composition and/or genomic environment through deliberate human manipulation. Preferably the nucleic acid sequence encoding a SYT polypeptide is of plant origin. The nucleic acid sequence may be isolated from a dicotyledonous species, preferably from the family Brassicaceae, further preferably from Arabidopsis thaliana or Brassica napus. Alternatively, nucleic acid sequence may be isolated from the family Fabaceae, preferably from Glycine max. More preferably, the SYT nucleic acid sequence isolated from:
[0313] (a) Arabidopsis thaliana is as represented by SEQ ID NO: 59 and the SYT polypeptide as represented by SEQ ID NO: 60;
[0314] (b) Brassica napus is as represented by SEQ ID NO: 150 and the SYT polypeptide as represented by SEQ ID NO: 151;
[0315] (c) Glycine max is as represented by SEQ ID NO: 152 and the SYT polypeptide as represented by SEQ ID NO: 153.

[0316] The terms “yield”, “seed yield” and “early vigour” are defined above. The terms “increased”, “improved”, “enhanced”, “amplified”, “extended”, or “rised” are interchangeable and are defined hereinabove. Taking corn as an example, a yield increase may be manifested as one or more of the following: increase in the number of plants per square meter, an increase in the number of ears per plant, an increase in the number of rows, number of kernels per row, kernel weight, thousand kernel weight, ear length/diameter, increase in the seed filling rate (which is the number of filled seeds divided by the total number of seeds and multiplied by 100), among others. Taking rice as an example, a yield increase may be manifested by an increase in one or more of the following: number of plants per square meter, number of panicles per plant, number of spikelets per panicle, number of flowers (florets) per panicle (which is expressed as a ratio of the number of filled seeds over the number of primary panicles), increase in the seed filling rate (which is the number of filled seeds divided by the total number of seeds and multiplied by 100), increase in thousand kernel weight, among others.

[0317] An increase in yield may also result in modified architecture, or may occur as a result of modified architecture.

[0318] According to a preferred feature, performance of the methods of the invention result in plants having increased biomass, increased seed yield and/or early vigour under abiotic stress relative to control plants. Therefore, according to the present invention, there is provided a method for increasing biomass, seed yield and/or early vigour in a plant under abiotic stress relative to control plants, which method comprises modulating expression in a plant of a nucleic acid sequence encoding a SYT polypeptide. Preferably, by increased biomass is herein taken to mean the aboveground part (or leafy biomass) during plant development and at maturity. Preferably, by increased seed yield is herein taken to mean any one of the following: total seed yield, number of filled seeds, seed fill rate, TKW and harvest index.

[0319] Since the transgenic plants according to the present invention have increased yield under abiotic stress, it is likely that these plants exhibit an increased growth rate under abiotic stress (during at least part of their life cycle, for example at seedling stage for early vigour), relative to the growth rate of control plants at a corresponding stage in their life cycle. The increased growth rate may be specific to one or more parts of a plant (including seeds), or may be throughout substantially the whole plant. The increase in growth rate may take place at one or more stages in the life cycle of a plant or during substantially the whole plant life cycle. Increased growth rate during the early stages in the life cycle of a plant may reflect enhanced vigour. The increase in growth rate may alter the harvest cycle of a plant allowing plants to be sown later and/or harvested sooner than would otherwise be possible. If the growth rate is sufficiently increased, it may allow for the further sowing of seeds of the same plant species (for example sowing and harvesting of rice plants followed by sowing and harvesting of further rice plants all within one conventional growing period). Similarly, if the growth rate is sufficiently increased, it may allow for the further sowing of seeds of different plants species (for example the planting and harvesting of corn plants followed by, for example, the planting and optional harvesting of soybean, potato or any other suitable plant). Harvesting additional times from the same rootstock in the case of some crop plants may also be possible. Altering the harvest cycle of a plant may lead to an increase in annual biomass production per square meter (due to an increase in the number of times (say in a year) that any particular plant may be grown and harvested). An increase in growth rate may also allow for the cultivation of transgenic plants in a wider geographical area than their wild-type counterparts, since the territorial limitations for growing a crop are often determined by adverse environmental conditions either at the time of planting (early season) or at the time of harvesting (late season). Such adverse conditions may be avoided if the harvest cycle is shortened. The growth rate may be determined by deriving various parameters from growth curves, such parameters may be: T-Mid (the time taken for plants to reach 50% of their maximal size) and T-90 (time taken for plants to reach 90% of their maximal size), amongst others. The growth rate of plants is measured under abiotic stress such as salt stress; water stress (drought or excess water); reduced nutrient availability stress; temperature stresses caused by atypical hot or cold/freezing temperatures; oxidative stress; metal stress; chemical toxicity stress; or combinations thereof.

[0320] Performance of the methods of the invention gives plants having an increased growth rate under abiotic stress relative to control plants. Therefore, according to the present invention, there is provided a method for increasing growth rate in plants under abiotic stress relative to control plants, which method comprises modulating expression in a plant of a nucleic acid sequence encoding a SYT polypeptide.

[0321] Plants typically respond to exposure to stress by growing more slowly. In conditions of severe stress, the plant may even stop growing altogether. Mild stress in the sense of the invention leads to a reduction in the growth of the stressed plants of less than 40%, 35% or 30%, preferably less than 25%, 20% or 15%, more preferably less than 14%, 13%, 12%, 11% or 10% or less in comparison to the control plant under non-stress conditions. Due to advances in agricultural practices (irrigation, fertilization, pesticide treatments) severe stresses are not often encountered in cultivated crop plants. As a consequence, the compromised growth induced by mild stress is often an undesirable feature for agriculture. Mild stresses are the typical stresses to which a plant may be exposed. These stresses may be the everyday biotic and/or abiotic (environmental) stresses to which a plant is exposed. Biotic stresses are typically those stresses caused by pathogens, such as bacteria, viruses, fungi, nematodes and insects. Typical abiotic or environmental stresses comprise any one or more of: salt stress, water stress (drought or excess water), reduced nutrient availability stress, temperature stresses caused by atypical hot or cold/freezing temperatures, oxidative stress, metal stress or chemical toxicity stress.

[0322] Performance of the methods according to the present invention results in plants having increased yield and/or early vigour under abiotic stress relative to control plants. As reported in Wang et al., (Planta (2003) 218: 1-14), abiotic stress leads to a series of morphological, physiological, biochemical and molecular changes that adversely affect plant growth and productivity. Drought, salinity, extreme temperatures and oxidative stress are often interconnected and may induce growth and cellular damage through similar mechanisms. For example, drought and/or salinisation are manifested primarily as osmotic stress, resulting in the disruption of homeostasis and ion distribution in the cell. Oxidative stress, which frequently accompanies high or low temperature, salinity or drought stress, may cause denaturation of functional and structural proteins. Reduced nutrient availability, in particular reduced nitrogen availability, is a major limiting factor for plant growth, for example through the reduced availability of amino acids for protein synthesis. As a consequence, these diverse environmental stresses often activate similar cell signaling pathways and cellular responses, such as the production of stress proteins, up-regulation of anti-oxidants, accumulation of compatible solutes and growth arrest.

[0323] Since diverse environmental stresses activate similar pathways, the exemplification of the present invention with salt stress should not be seen as a limitation to salt stress, but more as a screen to indicate the involvement of SYT polypeptides in abiotic stresses in general. A review in TRENDS in Plant Science (Jian-Kang Zhu, Vol. 6, No. 2, February 2001) confirms that transgenic plants performing better under salt stress often also perform better under other stresses including chilling, freezing, heat and drought. A particularly high degree of “cross talk” is reported between drought stress and high-salinity stress (Rabbani et al., Plant Physiology, December 2003, Vol. 133, pp. 1755-1767). Therefore, it would be apparent that a SYT polypeptide (as defined herein) would, along with its usefulness in increasing yield and/or early vigour in plants under salt stress, also find use in increasing yield and/or early vigour of the plant under various other abiotic stresses.

[0324] The term “abiotic stress” as defined herein is taken to mean any one or more of: salt stress, water stress (drought or excess water), reduced nutrient availability stress, temperature stresses caused by atypical hot or cold/freezing temperatures, oxidative stress, metal stress or chemical toxicity stress. The term salt stress is not restricted to common salt (NaCl), but may be any one or more of: NaCl, KCl, LiCl, MgCl₂, CaCl₂, amongst others.

[0325] Performance of the methods of the invention gives plants having increased yield and/or early vigour under abiotic stress relative to control plants. Therefore, according to the present invention, there is provided a method for increasing plant yield and/or early vigour under abiotic stress relative to control plants, which method comprises modulating expression in a plant of a nucleic acid sequence encoding a SYT polypeptide. By abiotic stress is taken to mean any one or more of: salt stress, water stress (drought or excess water), reduced nutrient availability stress, temperature stresses caused by atypical hot or cold/freezing temperatures, oxidative stress, metal stress or chemical toxicity stress.

[0326] The methods of the invention are advantageously applicable to any plant. Plants that are particularly useful in the methods of the invention include all plants which belong to the superfamily Viridiplantae, in particular monocotyledonous and dicotyledonous plants including fodder or forage legumes, ornamental plants, food crops, trees or shrubs. According to a preferred embodiment of the present invention, the plant is a crop plant. Examples of crop plants include soybean, sunflower, canola, alfalfa, rapeseed, cotton, tomato, potato and tobacco. Further preferably, the plant is a monocotyledonous plant. Examples of monocotyledonous plants include sugarcane. More preferably the plant is a cereal. Examples of cereals include rice, maize, wheat, barley, millet, rye, triticale, sorghum and oats.

[0327] A preferred method for introducing a genetic modification is to introduce and express in a plant a nucleic acid sequence encoding a SYT polypeptide. A SYT polypeptide is defined as a polypeptide comprising from N-terminal to C-terminal: (i) an SNH domain having in increasing order of preference at least 20%, 25%, 30%, 35%, 40%, 45%, 50%, 55%, 60%, 65%, 70%, 75%, 80%, 85%, 90%, 91%, 92%, 93%, 94%, 95%, 96%, 97%, 98%, 99% sequence identity to the SNH domain of SEQ ID NO: 58; and (ii) a Met-rich domain; and (iii) a QG-rich domain. Preferably, the SNH domain comprises the residues shown in black in FIG. 6. Further preferably, the SNH domain is represented by SEQ ID NO: 57.

[0328] According to a preferred aspect of the present invention, the modulated expression of a SYT nucleic acid sequence is increased expression. The increase in expression may lead to raised SYT mRNA or polypeptide levels, which could equate to raised activity of the SYT polypeptide; or the activity may also be raised when there is no change in polypeptide levels, or even when there is a reduction in polypeptide levels. This may occur when the intrinsic properties of the SYT polypeptide are altered, for example, by making mutant versions that are more active that the wild type polypeptide. Methods for increasing or reducing expression of genes or gene products are known in the art.

[0329] The invention also provides genetic constructs and vectors to facilitate introduction and/or expression of the nucleotide sequences useful in the methods according to the invention.

[0330] Therefore, there is provided a genetic construct comprising:
[0331] (i) A nucleic acid sequence encoding a SYT polypeptide, as defined hereinabove, or a nucleic acid sequence as represented by SEQ ID NO: 150 or SEQ ID NO: 152;
[0332] (ii) One or more control sequences capable of driving expression of the nucleic acid sequence of (i); and optionally
[0333] (iii) A transcription termination sequence.

[0334] A preferred construct is one where the control sequence is a promoter derived from a plant, preferably from a monocotyledonous plant if a monocotyledonous is to be transformed.

[0335] Constructs useful in the methods according to the present invention may be constructed using recombinant DNA technology well known to persons skilled in the art. The genetic constructs may be inserted into vectors, which may be commercially available, suitable for transforming into plants and suitable for expression of the gene of interest in the transformed cells. The invention therefore provides use of a genetic construct as defined hereinabove in the methods of the invention.

[0336] Plants are transformed with a vector comprising the sequence of interest (i.e., a nucleic acid sequence encoding a SYT polypeptide). The sequence of interest is operably linked to one or more control sequences (at least to a promoter).

[0337] Advantageously, any type of promoter may be used to drive expression of the nucleic acid sequence.

[0338] Useful promoters are constitutive promoters (Benfey et al., EMBO J. 8 (1989) 2195-2202), such as those which originate from plant viruses, such as 35S CAMV (Franck et al., Cell 21 (1980) 285-294), 19S CaMV (see also U.S. Pat. No. 5,352,605 and WO 84/02913), 34S FMV (Sanger et al., Plant. Mol. Biol., 14, 1990: 433-443), the parsley ubiquitin promoter, or plant promoters such as the Rubisco small subunit promoter described in U.S. Pat. No. 4,962,028 or the plant promoters PRP1 [Ward et al., Plant. Mol. Biol. 22 (1993)], SSU, PGEL1, OCS [Leisner (1988) Proc Natl Acad Sci USA 85(5): 2553-2557], lib4, usp, mas [Comai (1990) Plant Mol Biol 15 (3):373-381], STLS1, ScBV (Schenk (1999) Plant Mol Biol 39(6):1221-1230), B33, SAD1 or SAD2 (flax promoters, Jain et al., Crop Science, 39 (6), 1999: 1696-1701) or nos [Shaw et al. (1984) Nucleic Acids Res. 12(20):7831-7846]. Further examples of constitutive plant promoters are the sugarbeet V-ATPase promoters (WO 01/14572). Examples of synthetic constitutive promoters are the Super promoter (WO 95/14098) and promoters derived from G-boxes (WO 94/12015). If appropriate, chemical inducible promoters may furthermore also be used, compare EP-A 388186, EP-A 335528, WO 97/06268. Stable, constitutive expression of the polypeptides according to the invention a plant can be advantageous. However, inducible expression of the polypeptide of the invention is advantageous, if a late expression before the harvest is of advantage, as metabolic manipulation may lead to plant growth retardation.

[0339] The expression of plant genes can also be facilitated via a chemical inducible promoter (for a review, see Gatz 1997, Annu. Rev. Plant Physiol. Plant Mol. Biol., 48:89-108). Chemically inducible promoters are particularly suitable when it is desired to express the gene in a time-specific manner. Examples of such promoters are a salicylic acid inducible promoter (WO 95/19443), and abscisic acid-inducible promoter (EP 335 528), a tetracyclin-inducible promoter (Gatz et al. (1992) Plant J. 2, 397-404), a cyclohexanol- or ethanol-inducible promoter (WO 93/21334) or others as described herein.

[0340] Other suitable promoters are those that react to biotic or abiotic stress, for example the pathogen-induced PRP1 gene promoter (Ward et al., Plant. Mol. Biol. 22 (1993) 361-366), the tomato heat-inducible hsp80 promoter (U.S. Pat. No. 5,187,267), the potato chill-inducible alpha-amylase promoter (WO 96/12814) or the wound-inducible pinII promoter (EP-A-0 375 091) or others as described herein.

[0341] Preferred promoters are in particular those which bring gene expression in tissues and organs, in seed cells, such as endosperm cells and cells of the developing embryo. Suitable promoters are the oilseed rape napin gene promoter (U.S. Pat. No. 5,608,152), the Vicia faba USP promoter (Baeumlein et al., Mol Gen Genet, 1991, 225 (3): 459-67), the Arabidopsis oleosin promoter (WO 98/45461), the Phaseolus vulgaris phaseolin promoter (U.S. Pat. No. 5,504,200), the Brassica Bce4 promoter (WO 91/13980), the bean arcs promoter, the carrot DcG3 promoter, or the Legumin B4 promoter (LeB4; Baeumlein et al., 1992, Plant Journal, 2 (2): 233-9), and promoters which bring about the seed-specific expression in monocotyledonous plants such as maize, barley, wheat, rye, rice and the like. Advantageous seed-specific promoters are the sucrose binding protein promoter (WO 00/26388), the phaseolin promoter and the napin promoter. Suitable promoters which must be considered are the barley Ipt2 or Ipt1 gene promoter (WO 95/15389 and WO 95/23230), and the promoters described in WO 99/16890 (promoters from the barley hordein gene, the rice glutelin gene, the rice oryzin gene, the rice prolamin gene, the wheat gliadin gene, the wheat glutelin gene, the maize zein gene, the oat glutelin gene, the sorghum kasirin gene and the rye secalin gene). Further suitable promoters are Amy32b, Amy 6-6 and Aleurain [U.S. Pat. No. 5,677,474], Bce4 (oilseed rape) [U.S. Pat. No. 5,530,149], glycinin (soya) [EP 571 741], phosphoenolpyruvate carboxylase (soya) [JP 06/62870], ADR12-2 (soya) [WO 98/08962], isocitrate lyase (oilseed rape) [U.S. Pat. No. 5,689,040] or α-amylase (barley) [EP 781 849]. Other promoters which are available for the expression of genes in plants are leaf-specific promoters such as those described in DE-A 19644478 or light-regulated promoters such as, for example, the pea petE promoter.

[0342] Further suitable plant promoters are the cytosolic FBPase promoter or the potato ST-LSI promoter (Stockhaus et al., EMBO J. 8, 1989, 2445), the Glycine max phosphoribosylpyrophosphate amidotransferase promoter (GenBank Accession No. U87999) or the node-specific promoter described in EP-A-0 249 676.

[0343] In one embodiment, the SYT nucleic acid sequence is operably linked to a constitutive promoter. A constitutive promoter is transcriptionally active during most, but not necessarily all, phases of its growth and development and is substantially ubiquitously expressed. Preferably the promoter is derived from a plant, more preferably the promoter is from a monocotyledonous plant if a monocotyledonous plant is to be transformed. Further preferably, the constitutive promoter is a GOS2 promoter that is represented by a nucleic acid sequence substantially similar to SEQ ID NO: 145 or SEQ ID NO: 56. Most preferably the GOS2 promoter is as represented by SEQ ID NO: 56 or SEQ ID NO: 145. It should be clear that the applicability of the present invention is not restricted to the SYT nucleic acid sequence represented by SEQ ID NO: 59, nor is the applicability of the invention restricted to expression of a SYT nucleic acid sequence when driven by a GOS2 promoter. Examples of other constitutive promoters that may also be used to drive expression of a SYT nucleic acid sequence are shown in the definitions section.

[0344] Optionally, one or more terminator sequences may be used in the construct introduced into a plant. Additional regulatory elements may include transcriptional as well as translational enhancers. Those skilled in the art will be aware of terminator and enhancer sequences that may be suitable for use in performing the invention. An intron sequence may also be added to the 5′ untranslated region (UTR) or in the coding sequence to increase the amount of the mature message that accumulates in the cytosol, as described in the definitions section. Other control sequences (besides promoter, enhancer, silencer, intron sequences, 3′UTR and/or 5′UTR regions) may be protein and/or RNA stabilizing elements. Such sequences would be known or may readily be obtained by a person skilled in the art.

[0345] The genetic constructs of the invention may further include an origin of replication sequence that is required for maintenance and/or replication in a specific cell type. One example is when a genetic construct is required to be maintained in a bacterial cell as an episomal genetic element (e.g. plasmid or cosmid molecule). Preferred origins of replication include, but are not limited to, the f1-ori and colE1.

[0346] For the detection of the successful transfer of the nucleic acid sequences as used in the methods of the invention and/or selection of transgenic plants comprising these nucleic acids, it is advantageous to use marker genes (or reporter genes). Therefore, the genetic construct may optionally comprise a selectable marker gene. Selectable markers are described in more detail in the “definitions” section herein. The marker genes may be removed or excised from the transgenic cell once they are no longer needed. Techniques for marker removal are known in the art, useful techniques are described above in the definitions section.

[0347] The present invention also encompasses plants obtainable by the methods according to the present invention. The present invention therefore provides plants, plant parts and plant cells obtainable by the methods according to the present invention, which plants have introduced therein a SYT nucleic acid sequence and which plants, plant parts and plant cells are preferably from a crop plant, further preferably from a monocotyledonous plant.

[0348] The invention also provides a method for the production of transgenic plants having increased yield and/or early vigour under abiotic stress, comprising introduction and expression in a plant of a SYT nucleic acid sequence.

[0349] More specifically, the present invention provides a method for the production of transgenic plants, preferably monocotyledonous plants, having increased yield and/or early vigour under abiotic stress, which method comprises:
[0350] (i) introducing and expressing in a plant or plant cell a nucleic acid sequence encoding a SYT polypeptide; and
[0351] (ii) cultivating the plant cell under conditions promoting plant growth and development.

[0352] The nucleic acid of (i) may be any of the nucleic acids capable of encoding a SYT polypeptide, as defined hereinabove, or a nucleic acid sequence as represented by SEQ ID NO: 150 or SEQ ID NO: 152.

[0353] Subsequent generations of the plants obtained from cultivating step (ii) may be propagated by a variety of means, such as by clonal propagation or classical breeding techniques. For example, a first generation (or T1) transformed plant may be selfed to give homozygous second generation (or T2) transformants, and the T2 plants further propagated through classical breeding techniques.

[0354] The nucleic acid sequence may be introduced directly into a plant cell or into the plant itself (including introduction into a tissue, organ or any other part of a plant). According to a preferred feature of the present invention, the nucleic acid sequence is introduced into a plant by transformation.

[0355] Generally after transformation, plant cells or cell groupings are selected for the presence of one or more markers which are encoded by plant-expressible genes co-transferred with the gene of interest, following which the transformed material is regenerated into a whole plant. To select transformed plants, the plant material obtained in the transformation is, as a rule, subjected to selective conditions so that transformed plants can be distinguished from untransformed plants. For example, the seeds obtained in the above-described manner can be planted and, after an initial growing period, subjected to a suitable selection by spraying. A further possibility consists in growing the seeds, if appropriate after sterilization, on agar plates using a suitable selection agent so that only the transformed seeds can grow into plants. Alternatively, the transformed plants are screened for the presence of a selectable marker such as the ones described above.

[0356] Following DNA transfer and regeneration, putatively transformed plants may also be evaluated, for instance using Southern analysis, for the presence of the gene of interest, copy number and/or genomic organisation. Alternatively or additionally, expression levels of the newly introduced DNA may be monitored using Northern and/or Western analysis, both techniques being well known to persons having ordinary skill in the art.

[0357] The generated transformed plants may be propagated by a variety of means, such as by clonal propagation or classical breeding techniques. For example, a first generation (or T1) transformed plant may be selfed to give homozygous second generation (or T2) transformants, and the T2 plants further propagated through classical breeding techniques.

[0358] The generated transformed organisms may take a variety of forms. For example, they may be chimeras of transformed cells and non-transformed cells; clonal transformants (e.g., all cells transformed to contain the expression cassette); grafts of transformed and untransformed tissues (e.g., in plants, a transformed rootstock grafted to an untransformed scion).

[0359] The present invention clearly extends to any plant cell or plant produced by any of the methods described herein, and to all plant parts and propagules thereof. The present invention extends further to encompass the progeny of a primary transformed or transfected cell, tissue, organ or whole plant that has been produced by any of the aforementioned methods, the only requirement being that progeny exhibit the same genotypic and/or phenotypic characteristic(s) as those produced by the parent in the methods according to the invention. The invention also includes host cells containing an isolated SYT nucleic acid sequence. Preferred host cells according to the invention are plant cells. The invention also extends to harvestable parts of a plant such as, but not limited to seeds, leaves, fruits, flowers, stem cultures, roots, rhizomes, tubers and bulbs. The invention furthermore relates to products derived, preferably directly derived, from a harvestable part of such a plant, such as dry pellets or powders, meal, oil, fat and fatty acids, starch or proteins.

[0360] According to a preferred feature of the invention, the modulated expression is increased expression. Methods for increasing expression of nucleic acids or genes, or gene products, are well documented in the art and examples are provided in the definitions section.

[0361] Alternatively, the expression of a nucleic acid sequence encoding a SYT polypeptide may be modulated by introducing a genetic modification, for example, by any one (or more) of the following techniques: T-DNA activation, TILLING, homologous recombination, or by introducing and expressing in a plant a nucleic acid sequence encoding a SYT polypeptide. Following introduction of the genetic modification, there follows a step of selecting for modulated expression of a nucleic acid sequence encoding a SYT polypeptide, which modulated expression gives plants having increased yield and/or early vigour under abiotic stress.

[0362] One such technique is T-DNA activation tagging. The promoter to be introduced may be any promoter capable of driving expression of a gene in the desired organism, in this case a plant. For example, constitutive, tissue-preferred, cell type-preferred and inducible promoters are all suitable for use in T-DNA activation. The effects of the invention may also be reproduced using the technique of TILLING (Targeted Induced Local Lesions In Genomes). The effects of the invention may also be reproduced using homologous recombination.

[0363] The present invention also encompasses use of SYT nucleic acid sequences and use of SYT polypeptides, and use of a construct as defined hereinabove in increasing plant yield and/or early vigour under abiotic stress.

[0364] SYT nucleic acid sequences or SYT polypeptides may find use in breeding programmes in which a DNA marker is identified that may be genetically linked to a SYT. The SYT nucleic acid sequences or SYT polypeptides may be used to define a molecular marker. This DNA or polypeptide marker may then be used in breeding programmes to select plants having increased yield. The SYT gene may, for example, be a nucleic acid sequence as represented by any one of the SYT nucleic acid sequences as given in Table 6, or orthologues or paralogues of any of the aforementioned SEQ ID NOs.

[0365] Allelic variants of a SYT nucleic acid sequence may also find use in marker-assisted breeding programmes. Such breeding programmes sometimes require introduction of allelic variation by mutagenic treatment of the plants, using for example EMS mutagenesis; alternatively, the programme may start with a collection of allelic variants of so called “natural” origin caused unintentionally. Identification of allelic variants then takes place, for example, by PCR. This is followed by a step for selection of superior allelic variants of the sequence in question and which give increased yield. Selection is typically carried out by monitoring growth performance of plants containing different allelic variants of the sequence in question, for example, different allelic variants of any one of the SYT nucleic acid sequences as given in Table 6, or orthologues or paralogues of any of the aforementioned SEQ ID NOs. Growth performance may be monitored in a greenhouse or in the field. Further optional steps include crossing plants, in which the superior allelic variant was identified, with another plant. This could be used, for example, to make a combination of interesting phenotypic features.

[0366] SYT nucleic acid sequences may also be used as probes for genetically and physically mapping the genes that they are a part of, and as markers for traits linked to those genes. Such information may be useful in plant breeding in order to develop lines with desired phenotypes. Such use of SYT nucleic acid sequences requires only a nucleic acid sequence of at least 15 nucleotides in length. The SYT nucleic acid sequences may be used as restriction fragment length polymorphism (RFLP) markers. Southern blots (Sambrook J, Fritsch E F and Maniatis T (1989) Molecular Cloning, A Laboratory Manual) of restriction-digested plant genomic DNA may be probed with the SYT nucleic acid sequences. The resulting banding patterns may then be subjected to genetic analyses using computer programs such as MapMaker (Lander et al. (1987) Genomics 1: 174-181) in order to construct a genetic map. In addition, the nucleic acid sequences may be used to probe Southern blots containing restriction endonuclease-treated genomic DNAs of a set of individuals representing parent and progeny of a defined genetic cross. Segregation of the DNA polymorphisms is noted and used to calculate the position of the SYT nucleic acid sequence in the genetic map previously obtained using this population (Botstein et al. (1980) Am. J. Hum. Genet. 32:314-331).

[0367] The production and use of plant gene-derived probes for use in genetic mapping is described in Bematzky and Tanksley (1986) Plant Mol. Biol. Reporter 4: 37-41. Numerous publications describe genetic mapping of specific cDNA clones using the methodology outlined above or variations thereof. For example, F2 intercross populations, backcross populations, randomly mated populations, near isogenic lines, and other sets of individuals may be used for mapping. Such methodologies are well known to those skilled in the art.

[0368] The nucleic acid probes may also be used for physical mapping (i.e., placement of sequences on physical maps; see Hoheisel et al. In: Non-mammalian Genomic Analysis: A Practical Guide, Academic press 1996, pp. 319-346, and references cited therein).

[0369] In another embodiment, the nucleic acid probes may be used in direct fluorescence in situ hybridization (FISH) mapping (Trask (1991) Trends Genet. 7:149-154). Although current methods of FISH mapping favor use of large clones (several kb to several hundred kb; see Laan et al. (1995) Genome Res. 5:13-20), improvements in sensitivity may allow performance of FISH mapping using shorter probes.

[0370] A variety of nucleic acid amplification-based methods for genetic and physical mapping may be carried out using the nucleic acid sequences. Examples include allele-specific amplification (Kazazian (1989) J. Lab. Clin. Med 11:95-96), polymorphism of PCR-amplified fragments (CAPS; Sheffield et al. (1993) Genomics 16:325-332), allele-specific ligation (Landegren et al. (1988) Science 241:1077-1080), nucleotide extension reactions (Sokolov (1990) Nucleic Acid Res. 18:3671), Radiation Hybrid Mapping (Walter et al. (1997) Nat. Genet. 7:22-28) and Happy Mapping (Dear and Cook (1989) Nucleic Acid Res. 17:6795-6807). For these methods, the nucleic acid sequence is used to design and produce primer pairs for use in the amplification reaction or in primer extension reactions. The design of such primers is well known to those skilled in the art. In methods employing PCR-based genetic mapping, it may be necessary to identify DNA sequence differences between the parents of the mapping cross in the region corresponding to the instant nucleic acid sequence. This, however, is generally not necessary for mapping methods.

[0371] The methods according to the present invention result in plants having increased yield under abiotic stress, as described hereinbefore. These yield-enhancing traits may also be combined with other economically advantageous traits, such as further yield-enhancing traits, tolerance to various stresses, traits modifying various architectural features and/or biochemical and/or physiological features.

Detailed Description for the cpFBPase Polypeptide

[0372] Surprisingly, it has now been found that increasing expression in aboveground parts of a plant of a nucleic acid sequence encoding a chloroplastic fructose-1,6-bisphosphatase (cpFBPase) polypeptide increases plant yield relative to control plants. Therefore, according to the present invention, there is provided a method for increasing plant yield relative to control plants, comprising increasing expression in aboveground parts of a plant of a nucleic acid sequence encoding a cpFBPase polypeptide.

[0373] Reference herein to “control plants” is taken to mean any suitable control plant or plants. The “reference”, “control”, or “wild type” are used herein interchangeably and is preferably a subject, e.g. an organelle, a cell, a tissue, a plant, which is as similar to the subject matter of the invention as possible. The reference, control or wild type is in its genome, transcriptome, proteome or metabolome as similar as possible to the subject of the present invention. Preferably, the term “reference-” “control-” or “wild type-”-organelle, -cell, -tissue or plant, relates to an organelle, cell, tissue or plant, which is nearly genetically identical to the organelle, cell, tissue or plant, of the present invention or a part thereof, preferably 95%, 98%, 99,00%, 99,10%, 99,30%, 99,50%, 99,70%, 99,90%, 99,99%, 99, 999% or more identical. Most preferably the “reference”, “control”, or “wild type” is preferably a subject, e.g. an organelle, a cell, a tissue, a plant, which is genetically identical to the plant, tissue, cell, organelle used according to the method of the invention except that the nucleic acid sequences or the gene product encoded by them are changed, modulated or modified according to the inventive method.

[0374] Unless otherwise specified, the terms “polynucleotides”, “nucleic acid” and “nucleic acid molecule”, are interchangeably in the present context. Unless otherwise specified, the terms “peptide”, “polypeptide” and “protein” are interchangeably in the present context. The term “sequence” may relate to polynucleotides, nucleic acids, nucleic acid molecules, peptides, polypeptides and proteins, depending on the context in which the term “sequence” is used. The terms “gene(s)”, “polynucleotide”, “nucleic acid sequence”, “nucleotide sequence”, or “nucleic acid molecule(s)” as used herein refers to a polymeric form of nucleotides of any length, either ribonucleotides or deoxyribonucleotides. The terms refer only to the primary structure of the molecule.

[0375] Thus, the terms “nucleic acid sequence”, “gene(s)”, “polynucleotide”, “nucleotide sequence”, or “nucleic acid molecule(s)” as used herein include double- and single-stranded DNA and RNA. They also include known types of modifications, for example, methylation, “caps”, substitutions of one or more of the naturally occurring nucleotides with an analog. Preferably, the DNA or RNA sequence of the invention comprises a coding sequence encoding the herein defined polypeptide.

[0376] A “coding sequence” is a nucleic acid sequence, which is transcribed into mRNA and/or translated into a polypeptide when placed under the control of appropriate regulatory sequences. The boundaries of the coding sequence are determined by a translation start codon at the 5′-terminus and a translation stop codon at the 3′-terminus. A coding sequence can include, but is not limited to mRNA, cDNA, recombinant nucleic acid sequences or genomic DNA, while introns may be present as well under certain circumstances.

[0377] The term “chloroplastic fructose-1,6-bisphosphatase (cpFBPase) polypeptide” as defined herein refers to a polypeptide functioning in the chloroplast and comprising: (i) at least one FBPase domain; and (ii) at least one redox regulatory insertion.

[0378] An example of a cpFBPase polypeptide as defined hereinabove as functioning in the chloroplast and comprising: (i) at least one FBPase domain; and (ii) at least one redox regulatory insertion is as represented in SEQ ID NO: 155. Further such examples are represented by any one of SEQ ID NO: 157, SEQ ID NO: 159, SEQ ID NO: 161, SEQ ID NO: 163, SEQ ID NO: 165, SEQ ID NO: 167, SEQ ID NO: 169, SEQ ID NO: 171, SEQ ID NO: 173, SEQ ID NO: 175, SEQ ID NO: 177, SEQ ID NO: 179, SEQ ID NO: 181, SEQ ID NO: 183, SEQ ID NO: 185, SEQ ID NO: 187, SEQ ID NO: 189, SEQ ID NO: 191, SEQ ID NO: 193, SEQ ID NO: 195 and SEQ ID NO: 197, or orthologues or paralogues of any of the aforementioned SEQ ID NOs. The invention is illustrated by transforming plants with the Chlamydomonas reinhardthii sequence represented by SEQ ID NO: 154, encoding the polypeptide of SEQ ID NO: 155. SEQ ID NO: 157 (encoded by SEQ ID NO: 156, from Bigelowiella natans), SEQ ID NO: 159 (encoded by SEQ ID NO: 158, from Aquilegia formosa x Aquilegia pubescens), SEQ ID NO: 161 (encoded by SEQ ID NO: 160, from Arabidopsis thaliana), SEQ ID NO: 163 (encoded by SEQ ID NO: 162, from Brassica napus), SEQ ID NO: 165 (encoded by SEQ ID NO: 164, from Cyanidioschyzon merolae) SEQ ID NO: 167 (encoded by SEQ ID NO: 166, from Glycine max), SEQ ID NO: 169 (encoded by SEQ ID NO: 168, from Lycopersicon esculentum), SEQ ID NO: 171 (encoded by SEQ ID NO: 170, from Medicago truncatula), SEQ ID NO: 173 (encoded by SEQ ID NO: 172, from Nicotiana tabacum), SEQ ID NO: 175 (encoded by SEQ ID NO: 174, from Oryza sativa), SEQ ID NO: 177 (encoded by SEQ ID NO: 176, from Ostreococcus lucimarinus), SEQ ID NO: 179 (encoded by SEQ ID NO: 178, from Ostreococcus tauri), SEQ ID NO: 181 (encoded by SEQ ID NO: 180, from Phaeodactylum tricornutum), SEQ ID NO: 183 (encoded by SEQ ID NO: 182, from Pisum sativa), SEQ ID NO: 185 (encoded by SEQ ID NO: 184, from Poncirus trifoliata), SEQ ID NO: 187 (encoded by SEQ ID NO: 186, from Populus tremuloides), SEQ ID NO: 189 (encoded by SEQ ID NO: 188, from Solanum tuberosum), SEQ ID NO: 191 (encoded by SEQ ID NO: 190, from Spinacia oleracea), SEQ ID NO: 193 (encoded by SEQ ID NO: 192, from Triticum aestivum), SEQ ID NO: 195 (encoded by SEQ ID NO: 194, from Zea mays) and SEQ ID NO: 197 (encoded by SEQ ID NO: 196, from Physicomitrella patens), are orthologues of the polypeptide of SEQ ID NO: 155.

[0379] It is to be understood that sequences falling under the definition of a “cpFBPase polypeptide” are not to be limited to the polypeptides given in Table 7 (and mentioned herein above) but that any polypeptide functioning in the chloroplast and comprising: (i) at least one FBPase domain; and (ii) at least one redox regulatory insertion, may be suitable in performing the methods of the invention. Preferably, the cpFBPase polypeptide is as represented by SEQ ID NO: 155.

[0380] However, performance of the invention is not restricted to these sequences; the methods of the invention may advantageously be performed using any cpFBPase-encoding nucleic acid or cpFBPase polypeptide as defined herein.

[0381] Examples of nucleic acids encoding cpFBPase polypeptides are given in Table C of Example 12 herein. Such nucleic acids are useful in performing the methods of the invention. The amino acid sequences given in Table C of Example 12 are example sequences of orthologues and paralogues of the cpFBPase polypeptide represented by SEQ ID NO: 155, the terms “orthologues” and “paralogues” being as defined herein. Orthologues and paralogues may easily be found by performing a so-called reciprocal blast search. This may be done by a first BLAST involving BLASTing a query sequence (for example, SEQ ID NO: 154 or SEQ ID NO: 155) against any sequence database, such as the publicly available NCB! database. BLASTN or TBLASTX (using standard default values) may be used when starting from a nucleotide sequence and BLASTP or TBLASTN (using standard default values) may be used when starting from a polypeptide sequence. The BLAST results may optionally be filtered. The full-length sequences of either the filtered results or non-filtered results are then BLASTed back (second BLAST) against sequences from the organism from which the query sequence is derived (where the query sequence is SEQ ID NO: 154 or SEQ ID NO: 155, the second BLAST would therefore be against Chlamydomonas sequences). The results of the first and second BLASTs are then compared. A paralogue is identified if a high-ranking hit from the first BLAST is from the same species as from which the query sequence is derived, a BLAST back then ideally results in the query sequence as highest hit (besides itself); an orthologue is identified if a high-ranking hit in the first BLAST is not from the same species as from which the query sequence is derived and preferably results upon BLAST back in the query sequence amongst the highest hits. High-ranking hits are those having a low E-value. The lower the E-value, the more significant the score (or in other words the lower the chance that the hit was found by chance). Computation of the E-value is well known in the art. In addition to E-values, comparisons are also scored by percentage identity. Percentage identity refers to the number of identical nucleotides (or amino acids) between the two compared nucleic acid (or polypeptide) sequences over a particular length. An example detailing the identification of orthologues and paralogues is given in Example 12. In the case of large families, ClustalW may be used, followed by a neighbour joining tree, to help visualize clustering of related genes and to identify orthologues and paralogues. Preferably, cpFBPase polypeptides useful in the methods of the invention are functioning in the chloroplast and comprise: (i) at least one FBPase domain; and (ii) at least one redox regulatory insertion; and (iii) in increasing order of preference, at least 40%, 45%, 50%, 55%, 65%, 70%, 75%, 80%, 85%, 90%, 95% or 98% sequence identity to SEQ ID NO: 155 (calculations shown in Example 14).

[0382] The alignment of multiple polypeptide sequences is used to find conserved domains and characteristic motifs in protein families, in the determination of evolutionary linkage and in the improved prediction of secondary and tertiary structure. Many programs are available to a person skilled in the art to perform such analysis, for example, the ones proposed by the Expasy proteomics toolbox hosted by the Swiss Institute for Bioinformatics.

[0383] Methods for the alignment of sequences for comparison are well known in the art, such methods include GAP, BESTFIT, BLAST, FASTA and TFASTA. GAP uses the algorithm of Needleman and Wunsch ((1970) J Mol Biol 48: 443-453) to find the global (i.e. spanning the complete sequences) alignment of two sequences that maximizes the number of matches and minimizes the number of gaps. The BLAST algorithm (Altschul et al. (1990) J Mol Biol 215: 403-10) calculates percent sequence identity and performs a statistical analysis of the similarity between the two sequences. The software for performing BLAST analysis is publicly available through the National Centre for Biotechnology Information (NCBI). Homologues may readily be identified using, for example, the ClustalW multiple sequence alignment algorithm (version 1.83), with the default pairwise alignment parameters, and a scoring method in percentage. Global percentages of similarity and identity may also be determined using one of the methods available in the MatGAT software package (Campanella et al., BMC Bioinformatics. 2003 Jul. 10; 4:29. MatGAT: an application that generates similarity/identity matrices using protein or DNA sequences.). Minor manual editing may be performed to optimise alignment between conserved motifs, as would be apparent to a person skilled in the art. Furthermore, instead of using full-length sequences for the identification of homologues, specific domains may also be used. The sequence identity values may be determined over the entire nucleic acid or amino acid sequence or over selected domains or conserved motif(s), using the programs mentioned above using the default parameters.

[0384] The terms “domain” and “motif” are described in the definitions section. Special databases exisit for the identification of domains. The FBPase domain in a cpFBPase polypeptide may be identified using, for example, SMART (Schultz et al. (1998) Proc. Natl. Acad. Sci. USA 95, 5857-5864; Letunic et al. (2002) Nucleic Acids Res 30, 242-244; hosted by the EMBL at Heidelberg, Germany), InterPro (Mulder et al., (2003) Nucl. Acids. Res. 31, 315-318; hosted by the European Bioinformatics Institute (EBI) in the United Kingdom), Prosite (Bucher and Bairoch (1994), A generalized profile syntax for biomolecular sequences motifs and its function in automatic sequence interpretation. (In) ISMB-94; Proceedings 2nd International Conference on Intelligent Systems for Molecular Biology. Altman R., Brutlag D., Karp P., Lathrop R., Searls D., Eds., pp 53-61, AAAIPress, Menlo Park; Hulo et al., Nucl. Acids. Res. 32: D134-D137, (2004), The ExPASy proteomics server is provided as a service to the scientific community (hosted by the Swiss Institute of Bioinformatics (SIB) in Switzerland) or Pfam (Bateman et al., Nucleic Acids Research 30(1): 276-280 (2002), hosted by the Sanger Institute in the United Kingdom). For example, in the InterPro database, the FBPase domain comprised in the cpFBPase polypeptide is designated IPR000146. In Example 15 are listed the entries identified in a number of databases, related to a cpFBPase polypeptide as represented by SEQ ID NO : 155.

[0385] An important motif comprised within the FBPase domain is the redox regulatory insertion, which is present only the cpFBPase polypeptides and not in the cyFBPase polypeptides. By aligning all FBPases polypeptides using the methods described hereinabove and in Example 13 (and FIG. 12), an insertion of amino acids comprising at least two cysteine residues necessary for disulphide bridge formation (i.e. redox regulation) is identified. The conserved cysteines are named after their position in the mature pea (Pisum sativa) polypeptide, i.e. Cys153, Cys173 and Cys178. Cys153 and Cys173 usually are the two partners involved in disulphide bridge formation (Chiadmi et al. (1999) EMBO J 18(23): 6809-6815). Cys153 and Cys173 are separated by a loop whose length is of 10, 11, 12, 13, 14, 15, 16, 17, 18, 19, 20, 21, 22, 23, 24, or 25 amino acid residues, preferably of 14, 15, 16, 17, 18, or 19 amino acid residues.

[0386] The task of protein subcellular localisation prediction is important and well studied. Knowing a protein's localisation helps elucidate its function. Experimental methods for protein localization range from immunolocalization to tagging of proteins using green fluorescent protein (GFP). Such methods are accurate although labor-intensive compared with computational methods. Recently much progress has been made in computational prediction of protein localisation from sequence data. Among algorithms well known to a person skilled in the art are available at the ExPASy Proteomics tools hosted by the Swiss Institute for Bioinformatics, for example, PSort, TargetP, ChloroP, Predotar, LipoP, MITOPROT, PATS, PTS1, SignalP and others. The identification of subcellular localisation of the polypeptide of the invention is shown in Example 16. In particular SEQ ID NO: 155 of the present invention is assigned to the plastidic (chloroplastic) compartment of photosynthetic (autotrophic) cells.

[0387] Methods for targeting to plastids are well known in the art and include the use of transit peptides. Table 7 below shows examples of transit peptides which can be used to target any FBPase polypeptide to a plastid, which FBPase polypeptide is not, in its natural form, normally targeted to a plastid, or which FBPase polypeptide in its natural form is targeted to a plastid by virtue of a different transit peptide (for example, its natural transit peptide). For example a nucleic acid sequence encoding a cyFBPase may also be suitable for use in the methods of the invention so long as the nucleic acid is targeted to a plastid, preferably to a chloroplast, and that is comprises at least one regulatory redox insertion.

TABLE 7
Examples of transit peptide sequences useful in targeting
amino acids to plastids

| NCBI | | | |
|---|---|---|---|
| Accession | Source | | |
| Number | Organism | Protein Function | Transit Peptide Sequence |
| P07839 | Chlamydomonas | Ferredoxin | MAMAMRSTFAARVGAKPAVRGARPAS |
| | | | RMSCMA |
| R23425 | Chlamydomonas | Rubisco activase | MQVTMKSSAVSGQRVGGARVATRSVR |
| | | | RAQLQV |
| CAA56932 | Arabidopsis | Asp amino | MASLMLSLGSTSLLPREINKDKLKLGTS |
| | thaliana | transferase | ASNPFLKAKSFSRVTMTVAVKPSR |
| CAA31991 | Arabidopsis | Acyl carrier | MATQFSASVSLQTSCLATTRISFQKPAL |
| | thaliana | protein1 | ISNHGKTNLSFNLRRSIPSRRLSVSC |
| CAB63798 | Arabidopsis | Acyl carrier | MASIAASASISLQARPRQLAIAASQVKS |
| | thaliana | protein2 | FSNGRRSSLSFNLRQLPTRLTVSCAAKP |
| | | | ETVDKVCAVVRKQL |
| CAB63799 | Arabidopsis | Acyl carrier | MASIATSASTSLQARPRQLVIGAKQVKS |
| | thaliana | protein3 | FSYGSRSNLSFNLRQLPTRLTVYCAAK |
| | | | PETVDKVCAVVRKQLSLKE |

[0388] cpFBPase polypeptides as represented by SEQ ID NO: 155 are enzymes with as Enzyme Commission (EC; classification of enzymes by the reactions they catalyse) number EC 3.1.3.11 for fructose-bisphosphatase (also called D-fructose-1,6-bisphosphate 1-phosphohydrolase). cpFBPase polypeptides catalyze the irreversible conversion of fructose-1,6-bisphophate to fructose-6-phosphate and Pi. The functional assay may be an assay for cpFBPase activity based on a colorimetric Pi assay, as described by Huppe and Buchanan (1989) in Naturforsch. 44c: 487-494. Other methods to assay the enzymatic activity are described by Alscher-Herman (1982) in Plant Physiol 70: 728-734.

[0389] By “functioning in the chloroplast” is taken to mean herein that the cpFBPase polypeptide is active in the chloroplast, i.e., the cpFBPase polypeptide is performing the enzymatic reaction consisting in hydrolysing fructose-1,6-bisphosphate into fructose-6-phosphate and Pi, in the chloroplast.

[0390] The nucleic acid sequences encoding cpFBpase polypeptides as given in Table 7, or encoding orthologues or paralogues of any of the aforementioned SEQ ID NOs need not be full-length nucleic acid sequences, since performance of the methods of the invention does not rely on the use of full-length nucleic acid sequences.

[0391] cpFBPase nucleic acid variants may also be suitable in practising the methods of the invention. Variant cpFBPase nucleic acid sequences typically are those having the same function as a naturally occurring cpFBPase nucleic acid sequence, which can be the same biological function or the function of increasing yield when expression of the nucleic acid sequence is increased in aboveground parts of a plant relative to a control plant. Examples of such cpFBPase variants include portions of nucleic acid sequences, nucleic acid sequences capable of hybridising to cpFBPases, splice variants, allelic variants either naturally occurring or by DNA manipulation, a cpFBPase nucleic acid sequence obtained by gene shuffling, or a cpFBPase nucleic acid sequence obtained by site-directed mutagenesis.

[0392] The term “portion” as used herein refers to a piece of DNA encoding a polypeptide functioning in the chloroplast and comprising: (i) at least one FBPase domain; and (ii) at least one redox regulatory insertion.

[0393] A portion may be prepared, for example, by making one or more deletions to a nucleic acid encoding a cpFBPase polypeptide as defined hereinabove. The portions may be used in isolated form or they may be fused to other coding (or non coding) sequences in order to, for example, produce a polypeptide that combines several activities. In another example, the naturally occurring transit peptide coding sequence may be replaced by a transit peptide coding sequence from another photosynthetic organism, or by a synthetic one. If chloroplast transformation is considered, the transit peptide coding sequence may be removed altogether. When fused to other coding sequences, the resultant polypeptide produced upon translation may be bigger than that predicted for the cpFBPase portion. Portions useful in the methods of the invention are typically at least 900 nucleotides in length, preferably at least 1000 nucleotides in length, more preferably at least 1100 nucleotides in length and most preferably at least 1200 nucleotides in length. Preferably, the portion is a portion of a nucleic acid sequence as represented by any one of the nucleic acid sequences given in Table 7, or nucleic acid sequences encoding orthologues or paralogues of any of the aforementioned SEQ ID NOs. Most preferably the portion is a portion of a nucleic acid sequence as represented by SEQ ID NO: 154.

[0394] According to the present invention, there is provided a method for increasing yield in plants, comprising increasing expression in a plant of a portion of any one of the nucleic acid sequences given in Table C of Example 12, or of a portion of a nucleic acid encoding an orthologue, paralogue or homologue of any of the amino acid sequences given in Table C of Example 12.

[0395] Another nucleic acid variant useful in the methods of the invention, is a nucleic acid capable of hybridising under reduced stringency conditions, preferably under stringent conditions, with a nucleic acid sequence encoding a cpFBPase polypeptide as defined hereinabove, or a with a portion as defined hereinabove.

[0396] According to the present invention, there is provided a method for increasing yield in plants, comprising increasing expression in a plant of a nucleic acid capable of hybridizing to any one of the nucleic acids given in Table C of Example 12, or comprising increasing expression in a plant of a nucleic acid capable of hybridising to a nucleic acid encoding an orthologue, paralogue or homologue of any of the nucleic acid sequences given in Table C of Example 12.

[0397] Hybridising sequences useful in the methods of the invention, encode a cpFBPase polypeptide functioning in the chloroplast and comprising: (i) at least one FBPase domain; and (ii) at least one redox regulatory insertion, and having substantially the same biological activity as the cpFBPase polypeptide as represented by SEQ ID NO: 155. Methods for designing probes are well known in the art. The hybridising sequence is typically less than 1000 by in length, preferably less than 900, 800, 700, 600 or 500 by in length. Commonly, hybridising sequence lengths for DNA-DNA hybridisations such as Southern blotting vary between 100 and 500 bp, whereas for DNA-DNA hybridisations such as in PCR amplification generally shorter than 50 but longer than 10 nucleotides. Preferably, the hybridising sequence is one that is capable of hybridising to any of the nucleic acid sequences (or to probes derived from) as represented by the nucleic acid sequences given in Table 7, or nucleic acid sequences encoding orthologues or paralogues of any of the aforementioned SEQ ID NOs, or to a portion of any of the aforementioned sequences, a portion being as defined above. Most preferably the hybridising sequence is capable of hybridising to SEQ ID NO: 154, or to portions (or probes) thereof.

[0398] Another nucleic acid variant useful in the methods of the invention is a splice variant encoding a cpFBPase polypeptide as defined hereinabove. Such variants will be ones in which the biological activity of the protein is substantially retained; this may be achieved by selectively retaining functional segments of the protein. Preferred splice variants are splice variants of the cpFBPase nucleic acid sequences as given in Table 7, or nucleic acid sequences encoding orthologues or paralogues of any of the aforementioned SEQ ID NOs. Most preferred is a splice variant of a cpFBPase nucleic acid sequence as represented by SEQ ID NO: 154.

[0399] Another nucleic acid variant useful in performing the methods of the invention is an allelic variant of a nucleic acid sequence encoding a cpFBPase polypeptide as defined hereinabove. Allelic variants exist in nature, and encompassed within the methods of the present invention is the use of these natural alleles. Preferred allelic variants are allelic variants of the cpFBPase nucleic acid sequences as given in Table 7, or nucleic acid sequences encoding orthologues or paralogues of any of the aforementioned SEQ ID NOs. Most preferred is a splice variant of a cpFBPase nucleic acid sequence as represented by SEQ ID NO: 154.

[0400] According to the present invention, there is provided a method for increasing yield in plants, comprising increasing expression in a plant of a splice variant of any one of the nucleic acid sequences given in Table C of Example 12, or of a splice variant of a nucleic acid encoding an orthologue, paralogue or homologue of any of the amino acid sequences given in Table C of Example 12.

[0401] A further nucleic acid variant useful in the methods of the invention is a nucleic acid variant encoding a cpFBPase polypeptide obtained by gene shuffling (or directed evolution). Most preferred is a nucleic acid variant obtained by gene shuffling of a cpFBPase nucleic acid sequence as represented by SEQ ID NO: 155.

[0402] According to the present invention, there is provided a method for increasing yield in plants, comprising increasing expression in a plant of a variant of any one of the nucleic acid sequences given in Table C of Example 12, or comprising increasing expression in a plant of a variant of a nucleic acid encoding an orthologue, paralogue or homologue of any of the amino acid sequences given in Table C of Example 12, which variant nucleic acid is obtained by gene shuffling.

[0403] Another nucleic acid variant useful in the methods of the invention is a nucleic acid variant encoding a cpFBPase polypeptide obtained by site-directed mutagenesis. Site-directed mutagenesis may be used to generate variants of cpFBPase nucleic acid sequences. Several methods are available to achieve site-directed mutagenesis, the most common being PCR based methods (Current Protocols in Molecular Biology, Wiley Eds). For example, a mutation affecting the disulfide bridge formation is to change one of the conserved cysteines into serine, thereby making cpFBPase constitutively active (Chiadmi et al. (1999) EMBO J 18(23): 6809-6815). Most preferred is a nucleic acid variant obtained by site-directed mutagenesis of a cpFBPase nucleic acid sequence as represented by SEQ ID NO: 154.

[0404] The following cpFBPase nucleic acid variants are examples of variants suitable in practising the methods of the invention:
[0405] (i) a portion of a cpFBPase nucleic acid sequence;
[0406] (ii) a nucleic acid sequence capable of hybridising with a cpFBPase nucleic acid sequence;
[0407] (iii) a splice variant of a cpFBPase nucleic acid sequence;
[0408] (iv) an allelic variant of a cpFBPase nucleic acid sequence;
[0409] (v) a cpFBPase nucleic acid sequence obtained by gene shuffling;
[0410] (vi) a cpFBPase nucleic acid sequence obtained by site-directed mutagenesis.

[0411] Also useful in the methods of the invention are nucleic acid sequences encoding homologues of cpFBPase polypeptides as given in Table 7, or encoding orthologues or paralogues of any of the aforementioned SEQ ID NOs.

[0412] Also useful in the methods of the invention are nucleic acid sequences encoding derivatives of any one of the cpFBPase polypeptides as given in Table 7, or orthologues or paralogues of any of the aforementioned SEQ ID NOs. Derivatives of cpFBPase polypeptides as represented by any one given in Table 7, or orthologues or paralogues of any of the aforementioned SEQ ID NOs are further examples that may be suitable for use in the methods of the invention.

[0413] Nucleic acid sequences encoding cpFBPase polypeptides may be derived from any artificial source or natural source, such as plant, algae, diatom or animal. The nucleic acid sequence may be modified from its native form in composition and/or genomic environment through deliberate human manipulation. Preferably the nucleic acid sequence encoding a cpFBPase polypeptide originates from a photosynthetic cell (Plantae kingdom). Further preferably the nucleic acid sequence encoding a cpFBPase polypeptide originates from a plant cell. More preferably, the nucleic acid sequence encoding a cpFBPase polypeptide originates from a diatom cell. Most preferably the nucleic acid sequence encoding a cpFBPase polypeptide originates from an algal (red, brown or green) cell. The nucleic acid sequence may be isolated from green algae belonging Chlorophyta or Charophyta, or from land plants, non-vascular or vascular. For example, the nucleic acid sequence encoding the cpFBPase polypeptide is isolated from Chlamydomonas sp., Chlorella sp., Bigelowiella natans, Cyanidioschyzon merolae, Ostreococcus lucimarinus, Ostreococcus tauri, Galderia sulphuraria Physicomitrella patens, Phaeodactylum tricornutum, Aquilegia formosa x Aquilegia pubescen,s Arabidopsis thaliana, Brassica napus, Glycine max, Lycopersicon esculentum, Medicago truncatula, Nicotiana tabacum, Oryza sativa, Pisum sativa, Poncirus trifoliate, Populus tremuloides, Solanum tuberosum, Spinacia oleracea, Triticum aestivum, Zea mays and more. Most preferably the nucleic acid sequence encoding a cpFBPase polypeptide is from Chalmydomonas reinhardtii.

[0414] Performance of the methods of the invention gives plants having enhanced yield. The terms “yield”, “increased”, “improved”, “enhanced”, “amplified”, “extended”, “augmented” or “rised” are interchangeable and are defined above. Increased biomass may manifest itself as increased root biomass. Increased root biomass may be due to increased number of roots, increased root thickness and/or increased root length. Increased yield may manifest itself as one or more of the following:
[0415] (i) increased biomass (weight) of one or more parts of a plant, particularly aboveground (harvestable) parts, increased root biomass or increased biomass of any other harvestable part;
[0416] (ii) increased early vigour, defined herein as the seedling aboveground area three weeks post-germination;
[0417] (iii) increased total seed yield, which includes an increase in seed biomass (seed weight) and which may be an increase in the seed weight per plant or on an individual seed basis;
[0418] (iv) increased number of panicles per plant;
[0419] (v) increased number of flowers (“florets”) per panicle;
[0420] (vi) increased seed fill rate;
[0421] (vii) increased number of (filled) seeds;
[0422] (viii) increased seed size (length, width area, perimeter), which may also influence the composition of seeds;
[0423] (ix) increased seed volume, which may also influence the composition of seeds;
[0424] (x) increased harvest index, which is expressed as a ratio of the yield of harvestable parts, such as seeds, over the total biomass; and
[0425] (xi) increased thousand kernel weight (TKW), which is extrapolated from the number of filled seeds counted and their total weight. An increased TKW may result from an increased seed size and/or seed weight. An increased TKW may result from an increase in embryo size and/or endosperm size.

[0426] An increase in seed size, seed volume, seed area, seed perimeter, seed width and seed length may be due to an increase in specific parts of a seed, for example due to an increase in the size of the embryo and/or endosperm and/or aleurone and/or scutellum, or other parts of a seed.

[0427] In particular, increased yield is increased seed yield, and is selected from one or more of the following: (i) increased seed weight; (ii) increased number of filled seeds; (iii) increased seed fill rate; and (iv) increased harvest index.

[0428] Taking corn as an example, a yield increase may be manifested as one or more of the following: increase in the number of plants per square meter, an increase in the number of ears per plant, an increase in the number of rows, number of kernels per row, kernel weight, thousand kernel weight, ear length/diameter, increase in the seed filling rate (which is the number of filled seeds divided by the total number of seeds and multiplied by 100), among others.

[0429] Taking rice as an example, a yield increase may be manifested by an increase in one or more of the following: number of plants per square meter, number of panicles per plant, number of spikelets per panicle, number of flowers (florets) per panicle (which is expressed as a ratio of the number of filled seeds over the number of primary panicles), increase in the seed filling rate (which is the number of filled seeds divided by the total number of seeds and multiplied by 100), increase in thousand kernel weight, among others.

[0430] An increase in yield may also result in modified architecture, or may occur as a result of modified architecture.

[0431] According to a preferred feature, performance of the methods of the invention results in plants having increased seed yield relative to control plants. Therefore, according to the present invention, there is provided a method for increasing seed yield, which method comprises increasing expression in aboveground parts of a plant of a nucleic acid sequence encoding a cpFBPase polypeptide.

[0432] Since the transgenic plants according to the present invention have increased yield, it is likely that these plants exhibit an increased growth rate (during at least part of their life cycle), relative to the growth rate of control plants at a corresponding stage in their life cycle.

[0433] The increased growth rate may be specific to one or more parts of a plant (including seeds), or may be throughout substantially the whole plant. Plants having an increased growth rate may have a shorter life cycle. The life cycle of a plant may be taken to mean the time needed to grow from a dry mature seed up to the stage where the plant has produced dry mature seeds, similar to the starting material. This life cycle may be influenced by factors such as early vigour, growth rate, greenness index, flowering time and speed of seed maturation. The increase in growth rate may take place at one or more stages in the life cycle of a plant or during substantially the whole plant life cycle. Increased growth rate during the early stages in the life cycle of a plant may reflect enhanced vigour. The increase in growth rate may alter the harvest cycle of a plant allowing plants to be sown later and/or harvested sooner than would otherwise be possible (a similar effect may be obtained with earlier flowering time). If the growth rate is sufficiently increased, it may allow for the further sowing of seeds of the same plant species (for example sowing and harvesting of rice plants followed by sowing and harvesting of further rice plants all within one conventional growing period). Similarly, if the growth rate is sufficiently increased, it may allow for the further sowing of seeds of different plants species (for example the sowing and harvesting of corn plants followed by, for example, the sowing and optional harvesting of soybean, potato or any other suitable plant). Harvesting additional times from the same rootstock in the case of some crop plants may also be possible. Altering the harvest cycle of a plant may lead to an increase in annual biomass production per square meter (due to an increase in the number of times (say in a year) that any particular plant may be grown and harvested). An increase in growth rate may also allow for the cultivation of transgenic plants in a wider geographical area than their wild-type counterparts, since the territorial limitations for growing a crop are often determined by adverse environmental conditions either at the time of planting (early season) or at the time of harvesting (late season). Such adverse conditions may be avoided if the harvest cycle is shortened. The growth rate may be determined by deriving various parameters from growth curves, such parameters may be: T-Mid (the time taken for plants to reach 50% of their maximal size) and T-90 (time taken for plants to reach 90% of their maximal size), amongst others.

[0434] According to a preferred feature of the present invention, performance of the methods of the invention gives plants having an increased growth rate relative to control plants. Therefore, according to the present invention, there is provided a method for increasing the growth rate of plants, which method comprises modulating expression, preferably increasing expression, in a plant of a nucleic acid encoding a cpFBPase polypeptide as defined herein.

[0435] An increase in yield and/or growth rate occurs whether the plant is under non-stress conditions or whether the plant is exposed to various stresses compared to control plants. Plants typically respond to exposure to stress by growing more slowly. In conditions of severe stress, the plant may even stop growing altogether. Mild stress on the other hand is defined herein as being any stress to which a plant is exposed which does not result in the plant ceasing to grow altogether without the capacity to resume growth. Mild stress in the sense of the invention leads to a reduction in the growth of the stressed plants of less than 40%, 35% or 30%, preferably less than 25%, 20% or 15%, more preferably less than 14%, 13%, 12%, 11% or 10% or less in comparison to the control plant under non-stress conditions. Due to advances in agricultural practices (irrigation, fertilization, pesticide treatments) severe stresses are not often encountered in cultivated crop plants. As a consequence, the compromised growth induced by mild stress is often an undesirable feature for agriculture. Mild stresses are the everyday biotic and/or abiotic (environmental) stresses to which a plant is exposed. Abiotic stresses may be due to drought or excess water, anaerobic stress, salt stress, chemical toxicity, oxidative stress and hot, cold or freezing temperatures. The abiotic stress may be an osmotic stress caused by a water stress (particularly due to drought), salt stress, oxidative stress or an ionic stress. Biotic stresses are typically those stresses caused by pathogens, such as bacteria, viruses, fungi and insects.

[0436] In particular, the methods of the present invention may be performed under non-stress conditions or under conditions of mild drought to give plants having increased yield relative to control plants. As reported in Wang et al. (Planta (2003) 218: 1-14), abiotic stress leads to a series of morphological, physiological, biochemical and molecular changes that adversely affect plant growth and productivity. Drought, salinity, extreme temperatures and oxidative stress are known to be interconnected and may induce growth and cellular damage through similar mechanisms. Rabbani et al. (Plant Physiol (2003) 133: 1755-1767) describes a particularly high degree of “cross talk” between drought stress and high-salinity stress. For example, drought and/or salinisation are manifested primarily as osmotic stress, resulting in the disruption of homeostasis and ion distribution in the cell. Oxidative stress, which frequently accompanies high or low temperature, salinity or drought stress, may cause denaturing of functional and structural proteins. As a consequence, these diverse environmental stresses often activate similar cell signalling pathways and cellular responses, such as the production of stress proteins, up-regulation of anti-oxidants, accumulation of compatible solutes and growth arrest. The term “non-stress” conditions as used herein are those environmental conditions that allow optimal growth of plants. Persons skilled in the art are aware of normal soil conditions and climatic conditions for a given location.

[0437] Performance of the methods of the invention gives plants grown under non-stress conditions or under mild drought conditions increased yield relative to control plants grown under comparable conditions. Therefore, according to the present invention, there is provided a method for increasing yield in plants grown under non-stress conditions or under mild drought conditions, which method comprises increasing expression in a plant of a nucleic acid encoding a cpFBPase polypeptide.

[0438] Performance of the methods of the invention gives plants grown under conditions of nutrient deficiency, particularly under conditions of nitrogen deficiency, increased yield relative to control plants grown under comparable conditions. Therefore, according to the present invention, there is provided a method for increasing yield in plants grown under conditions of nutrient deficiency, which method comprises increasing expression in a plant of a nucleic acid encoding a cpFBPase polypeptide. Nutrient deficiency may result from a lack of nutrients such as nitrogen, phosphates and other phosphorous-containing compounds, potassium, calcium, cadmium, magnesium, manganese, iron and boron, amongst others.

[0439] Preferably the increase in yield and/or growth rate occurs according to the method of invention under non-stress or mild abiotic or mild biotic stress conditions.

[0440] The term “expression” or “gene expression” means the transcription of a specific gene or specific genes or specific genetic construct. The term “expression” or “gene expression” in particular means the transcription of a gene or genes or genetic construct into structural RNA (rRNA, tRNA) or mRNA with or without subsequent translation of the latter into a protein. The process includes transcription of DNA and processing of the resulting mRNA product.

[0441] The term “increasing expression” is defined above. The increase in expression of the nucleic acid sequence encoding a cpFBPase polypeptide in aboveground parts leads to increased yield of the plants relative to control plants. Preferably, the increase in expression of the nucleic acid is 1.25, 1.5, 1.75, 2, 5, 7.5, 10, 15, 20, 25, 30, 35, 40, 45, 50, 55, 60, 65, 70, 75, 80, 85, 90, 95, 100 or more fold the expression of the endogenous plant cpFBPase polypeptide.

[0442] The term “aboveground parts of plant” is herein taken to mean plant parts excluding the roots, root hairs and any other plant part that is in the soil, i.e., that is not directly exposed to light.

[0443] By increasing the expression (in a plastid) of a nucleic acid sequence encoding a cpFBPase polypeptide, an increase in the amount of cpFBPase polypeptide is obtained. This increase in amount of cpFBPase polypeptide (in a plastid) leads to an increase in cpFBPase activity. Alternatively, activity may also be increased when there is no change in the amount of a cpFBPase polypeptide, or even when there is a reduction in the amount of a cpFBPase polypeptide. This may occur when the intrinsic properties of the polypeptide are altered, for example, by making mutant versions that are more active than the wild type polypeptide.

[0444] The expression of a nucleic acid sequence encoding a cpFBPase polypeptide is increased in a plastid using techniques well known in the art, such as by targeting a cpFBPase polypeptide to the plastid using transit peptide sequences or by direct transformation of a cpFBPase polypeptide without transit peptide sequences, into a plastid. Expression may be increased in any plastid, however, preferred is preferentially increasing expression in a chloroplast.

[0445] The expression of a nucleic acid sequence encoding a cpFBPase polypeptide may be modulated by introducing a genetic modification, for example, by any one (or more) of the following techniques: T-DNA activation, TILLING, homologous recombination, or by introducing and expressing in a plant a nucleic acid sequence encoding a cpFBPase polypeptide. Following introduction of the genetic modification, there follows a step of selecting for increased expression of a nucleic acid sequence encoding a cpFBPase polypeptide, which increased expression gives plants having increased yield relative to control plants.

[0446] One such technique is T-DNA activation tagging. The promoter to be introduced may be any promoter capable of driving expression of a gene in the desired organism, in this case a plant. For example, constitutive, aboveground parts, below ground parts, tissue-preferred, cell type-preferred and inducible promoters are all suitable for use in T-DNA activation. The effects of the invention may also be reproduced using the technique of TILLING or using homologous recombination.

[0447] A preferred method for introducing a genetic modification is to introduce and express in aboveground parts of a plant a nucleic acid sequence encoding a cpFBPase polypeptide. The cpFBPase as defined herein refers to a polypeptide functioning in the chloroplast and comprising: (i) at least one FBPase domain; and (ii) at least one redox regulatory insertion.

[0448] In one embodiment of the present invention, the expression of a nucleic acid sequence encoding a cpFBPase polypeptide is increased expression (in aboveground parts of plant). The increase in expression may lead to raised cpFBPase mRNA or polypeptide levels, which could equate to raised activity of the cpFBPase polypeptide; or the activity may also be raised when there is no change in polypeptide levels, or even when there is a reduction in polypeptide levels. This may occur when the intrinsic properties of the cpFBPase polypeptide are altered, for example, by making mutant versions that are more active that the wild type polypeptide. Methods for increasing expression of genes or gene products are well documented in the art.

[0449] The invention also provides genetic constructs and vectors to facilitate introduction and/or expression of the nucleotide sequences useful in the methods according to the invention.

[0450] Therefore, there is provided a genetic construct comprising:
[0451] (i) A nucleic acid sequence encoding a cpFBPase polypeptide, as defined hereinabove;
[0452] (ii) One or more control sequences capable of driving expression in aboveground parts of a plant, of the nucleic acid sequence of (i); and optionally
[0453] (iii) A transcription termination sequence;

[0454] A preferred construct is one whether the control sequence is a promoter derived from a plant, preferably from a monocotyledonous plant if a monocotyledonous is to be transformed.

[0455] Constructs useful in the methods according to the present invention may be constructed using recombinant DNA technology well known to persons skilled in the art. The genetic constructs may be inserted into vectors, which may be commercially available, suitable for transforming into plants and suitable for expression of the gene of interest in the transformed cells. The invention therefore provides use of a genetic construct as defined hereinabove in the methods of the invention.

[0456] Plants are transformed with a vector comprising the sequence of interest (i.e., a nucleic acid sequence encoding a cpFBPase polypeptide). The sequence of interest is operably linked to one or more control sequences (at least to a promoter). The terms “regulatory element”, “control sequence” and “promoter” are all used interchangeably herein and are defined above.

[0457] Advantageously, the promoter used to drive expression of the nucleic acid sequence may be a tissue-preferred promoter, i.e. one that is capable of preferentially initiating transcription in certain tissues, such as the leaves, stems, seed tissue etc. Promoters able to initiate transcription in certain tissues only are referred to herein as “tissue-specific”, similarly, promoters able to initiate transcription in certain cells only are referred to herein as “cell-specific”. Additionally or alternatively, the promoter may occur natural or synthetic. Preferably, the promoter is capable of driving expression of a nucleic acid encoding a cpFBPase polypeptide in aboveground parts of a plant, i.e., in parts exposed to light for proper cpFBPase redox regulation.

[0458] Other suitable promoters are constitutive promoters (Benfey et al., EMBO J. 8 (1989) 2195-2202), such as those which originate from plant viruses, such as 35S CAMV (Franck et al., Cell 21 (1980) 285-294), 19S CaMV (see also U.S. Pat. No. 5,352,605 and WO 84/02913), 34S FMV (Sanger et al., Plant. Mol. Biol., 14, 1990: 433-443), the parsley ubiquitin promoter, or plant promoters such as the Rubisco small subunit promoter described in U.S. Pat. No. 4,962,028 or the plant promoters PRP1 [Ward et al., Plant. Mol. Biol. 22 (1993)], SSU, PGEL1, OCS [Leisner (1988) Proc Natl Aced Sci USA 85(5): 2553-2557], lib4, usp, mas [Comai (1990) Plant Mol Biol 15 (3):373-381], STLS1, ScBV (Schenk (1999) Plant Mol Biol 39(6):1221-1230), B33, SAD1 or SAD2 (flax promoters, Jain et al., Crop Science, 39 (6), 1999: 1696-1701) or nos [Shaw et al. (1984) Nucleic Acids Res. 12(20):7831-7846]. Further examples of constitutive plant promoters are the sugarbeet V-ATPase promoters (WO 01/14572). Examples of synthetic constitutive promoters are the Super promoter (WO 95/14098) and promoters derived from G-boxes (WO 94/12015). If appropriate, chemical inducible promoters may furthermore also be used, compare EP-A 388186, EP-A 335528, WO97/06268. Stable, constitutive expression of the polypeptides according to the invention a plant can be advantageous. However, inducible expression of the polypeptide of the invention is advantageous, if a late expression before the harvest is of advantage, as metabolic manipulation may lead to plant growth retardation.

[0459] The expression of plant genes can also be facilitated via a chemical inducible promoter. Examples of such promoters are a salicylic acid inducible promoter (WO 95/19443), and abscisic acid-inducible promoter (EP 335 528), a tetracyclin-inducible promoter (Gatz et al. (1992) Plant J. 2, 397-404), a cyclohexanol- or ethanol-inducible promoter (WO 93/21334) or others as described herein.

[0460] Other suitable promoters are those that react to biotic or abiotic stress, for example the pathogen-induced PRP1 gene promoter (Ward et al., Plant. Mol. Biol. 22 (1993) 361-366), the tomato heat-inducible hsp80 promoter (U.S. Pat. No. 5,187,267), the potato chill-inducible alpha-amylase promoter (WO 96/12814) or the wound-inducible pinl I promoter (EP-A-0 375 091) or others as described herein.

[0461] Preferred promoters are in particular those which effect expression in tissues and organs, in seed cells, such as endosperm cells and cells of the developing embryo. Suitable promoters are the oilseed rape napin gene promoter (U.S. Pat. No. 5,608,152), the Vicia faba USP promoter (Baeumlein et al., Mol Gen Genet, 1991, 225 (3): 459-67), the Arabidopsis oleosin promoter (WO 98/45461), the Phaseolus vulgaris phaseolin promoter (U.S. Pat. No. 5,504,200), the Brassica Bce4 promoter (WO 91/13980), the bean arcs promoter, the carrot DcG3 promoter, or the Legumin B4 promoter (LeB4; Baeumlein et al., 1992, Plant Journal, 2 (2): 233-9), and promoters which bring about the seed-specific expression in monocotyledonous plants such as maize, barley, wheat, rye, rice and the like. Advantageous seed-specific promoters are the sucrose binding protein promoter (WO 00/26388), the phaseolin promoter and the napin promoter. Suitable promoters which must be considered are the barley Ipt2 or Ipt1 gene promoter (WO 95/15389 and WO 95/23230), and the promoters described in WO 99/16890 (promoters from the barley hordein gene, the rice glutelin gene, the rice oryzin gene, the rice prolamin gene, the wheat gliadin gene, the wheat glutelin gene, the maize zein gene, the oat glutelin gene, the sorghum kasirin gene and the rye secalin gene). Further suitable promoters are Amy32b, Amy 6-6 and Aleurain [U.S. Pat. No. 5,677,474], Bce4 (oilseed rape) [U.S. Pat. No. 5,530,149], glycinin (soya) [EP 571 741], phosphoenolpyruvate carboxylase (soya) [JP 06/62870], ADR12-2 (soya) [WO 98/08962], isocitrate lyase (oilseed rape) [U.S. Pat. No. 5,689,040] or α-amylase (barley) [EP 781 849].

[0462] Other promoters which are available for the expression of genes in plants are leaf-specific promoters such as those described in DE-A 19644478 or light-regulated promoters such as, for example, the pea petE promoter.

[0463] In one embodiment, the nucleic acid sequence is operably linked to a constitutive promoter. A constitutive promoter is transcriptionally active during most, but not necessarily all, phases of its growth and development and is substantially ubiquitously expressed (including in aboveground parts of a plant). Preferably the promoter is derived from a plant, more preferably the promoter is from a monocotyledonous plant if a monocotyledonous plant is to be transformed. Further preferably, the constitutive promoter is a GOS2 promoter that is represented by a nucleic acid sequence substantially similar to SEQ ID NO: 208 or SEQ ID NO: 56. Most preferably the GOS2 promoter is as represented by SEQ ID NO: 56 or SEQ ID NO: 208. It should be clear that the applicability of the present invention is not restricted to the cpFBPase nucleic acid sequence as represented by SEQ ID NO: 154, nor is the applicability of the invention restricted to expression of a cpFBPase nucleic acid sequence when driven by a GOS2 promoter. Examples of other constitutive promoters that may also be used to drive expression of a cpFBPase nucleic acid sequence are shown above.

[0464] Optionally, one or more terminator sequences may be used in the construct introduced into a plant. Additional regulatory elements may include transcriptional as well as translational enhancers. Those skilled in the art will be aware of terminator and enhancer sequences that may be suitable for use in performing the invention. An intron sequence may also be added to the 5′ untranslated region (UTR) or in the coding sequence to increase the amount of the mature message that accumulates in the cytosol, as described in the definitions section. Other control sequences (besides promoter, enhancer, silencer, intron sequences, 3′UTR and/or 5′UTR regions) may be protein and/or RNA stabilizing elements. Such sequences would be known or may readily be obtained by a person skilled in the art.

[0465] The genetic constructs of the invention may further include an origin of replication sequence that is required for maintenance and/or replication in a specific cell type. One example is when a genetic construct is required to be maintained in a bacterial cell as an episomal genetic element (e.g. plasmid or cosmid molecule). Preferred origins of replication include, but are not limited to, the f1-ori and colE1.

[0466] For the detection of the successful transfer of the nucleic acid sequences as used in the methods of the invention and/or selection of transgenic plants comprising these nucleic acids, it is advantageous to use marker genes (or reporter genes). Therefore, the genetic construct may optionally comprise a selectable marker gene. Selectable markers are described in more detail in the “definitions” section herein. The marker genes may be removed or excised from the transgenic cell once they are no longer needed. Techniques for marker removal are known in the art, useful techniques are described above in the definitions section. Different markers are preferred, depending on the organism and the selection method.

[0467] The present invention also encompasses plants (including seeds) obtainable by the methods according to the present invention. The present invention therefore provides plants, plant parts and plant cells obtainable by the methods according to the present invention, which plants have introduced therein a cpFBPase nucleic acid sequence and which plants, plant parts and plant cells are preferably from a crop plant, further preferably from a monocotyledonous plant.

[0468] The invention also provides a method for the production of transgenic plants having increased yield relative to control plants, comprising introduction and expression in a plant of a nucleic acid sequence encoding a cpFBPase polypeptide.

[0469] More specifically, the present invention provides a method for the production of transgenic plants, preferably monocotyledonous plants, having increased yield relative to control plants, which method comprises:
[0470] (i) introducing and expressing in aboveground parts of a plant or plant cell a nucleic acid sequence encoding a cpFBPase polypeptide; and
[0471] (ii) cultivating the plant cell under conditions promoting plant growth and development.

[0472] The nucleic acid of (i) may be any of the nucleic acids capable of encoding a cpFBPase polypeptide as defined herein.

[0473] The nucleic acid sequence may be introduced directly into a plant cell or into the plant itself (including introduction into a tissue, organ or any other part of a plant). According to a preferred feature of the present invention, the nucleic acid sequence is introduced into a plant by transformation.

[0474] The genetically modified plant cells can be regenerated via all methods with which the skilled worker is familiar. Suitable methods can be found in the abovementioned publications by S.D. Kung and R. Wu, Potrykus or Hofgen and Willmitzer.

[0475] Generally after transformation, plant cells or cell groupings are selected for the presence of one or more markers which are encoded by plant-expressible genes co-transferred with the gene of interest, following which the transformed material is regenerated into a whole plant. To select transformed plants, the plant material obtained in the transformation is, as a rule, subjected to selective conditions so that transformed plants can be distinguished from untransformed plants. For example, the seeds obtained in the above-described manner can be planted and, after an initial growing period, subjected to a suitable selection by spraying. A further possibility consists in growing the seeds, if appropriate after sterilization, on agar plates using a suitable selection agent so that only the transformed seeds can grow into plants. Alternatively, the transformed plants are screened for the presence of a selectable marker such as the ones described above.

[0476] Following DNA transfer and regeneration, putatively transformed plants may be evaluated, for instance using Southern analysis, for the presence of the gene of interest, copy number and/or genomic organisation. Alternatively or additionally, expression levels of the newly introduced DNA may be monitored using Northern and/or Western analysis, quantitative PCR, such techniques being well known to persons having ordinary skill in the art.

[0477] The generated transformed plants may be propagated by a variety of means, such as by clonal propagation or classical breeding techniques. For example, a first generation (or T1) transformed plant may be selfed to give homozygous second generation (or T2) transformants, and the T2 plants further propagated through classical breeding techniques.

[0478] The generated transformed organisms may take a variety of forms. For example, they may be chimeras of transformed cells and non-transformed cells; clonal transformants (e.g., all cells transformed to contain the expression cassette); grafts of transformed and untransformed tissues (e.g., in plants, a transformed rootstock grafted to an untransformed scion).

[0479] The methods of the invention are advantageously applicable to any plant. Plants that are particularly useful in the methods of the invention include all plants which belong to the superfamily Viridiplantae, in particular monocotyledonous and dicotyledonous plants including fodder or forage legumes, ornamental plants, food crops, trees or shrubs. According to a preferred embodiment of the present invention, the plant is a crop plant. Examples of crop plants include soybean, sunflower, canola, alfalfa, rapeseed, cotton, tomato, potato and tobacco. Further preferably, the plant is a monocotyledonous plant. Examples of monocotyledonous plants include sugarcane. More preferably the plant is a cereal. Examples of cereals include rice, maize, wheat, barley, millet, rye, triticale, sorghum and oats.

[0480] Other advantageous plants are selected from the group consisting of Asteraceae such as the genera Helianthus, Tagetes e.g. the species Helianthus annus [sunflower], Tagetes lucida, Tagetes erecta or Tagetes tenuifolia [Marigold], Brassicaceae such as the genera Brassica, Arabadopsis e.g. the species Brassica napus, Brassica rapa ssp. [canola, oilseed rape, turnip rape] or Arabidopsis thaliana; Fabaceae such as the genera Glycine e.g. the species Glycine max, Soja hispida or Soja max [soybean]; Linaceae such as the genera Linum e.g. the species Linum usitatissimum, [flax, linseed]; Poaceae such as the genera Hordeum, Secale, Avena, Sorghum, Oryza, Zea, Triticum e.g. the species Hordeum vulgare [barley]; Secale cereale [rye], Avena sativa, Avena fatua, Avena byzantina, Avena fatua var. sativa, Avena hybrida [oat], Sorghum bicolor [Sorghum, millet], Oryza sativa, Oryza latifolia [rice], Zea mays [corn, maize] Triticum aestivum, Triticum durum, Triticum turgidum, Triticum hybernum, Triticum macha, Triticum sativum or Triticum vulgare [wheat, bread wheat, common wheat]; Solanaceae such as the genera Solanum, Lycopersicon e.g. the species Solanum tuberosum [potato], Lycopersicon esculentum, Lycopersicon lycopersicum, Lycopersicon pyriforme, Solanum integrifolium or Solanum lycopersicum [tomato].

[0481] The present invention clearly extends to any plant cell or plant produced by any of the methods described herein, and to all plant parts and propagules thereof. The present invention extends further to encompass the progeny of a primary transformed or transfected cell, tissue, organ or whole plant that has been produced by any of the aforementioned methods, the only requirement being that progeny exhibit the same genotypic and/or phenotypic characteristic(s) as those produced by the parent in the methods according to the invention. The invention also includes host cells containing an isolated cpFBPase nucleic acid sequence. Preferred host cells according to the invention are plant cells. The invention also extends to harvestable parts of a plant such as, but not limited to seeds, leaves, fruits, flowers, stem cultures, rhizomes, tubers and bulbs. The invention furthermore relates to products derived, preferably directly derived, from a harvestable part of such a plant, such as dry pellets or powders, meal, oil, fat and fatty acids, starch or proteins.

[0482] The present invention also encompasses use of cpFBPase nucleic acid sequences and use of cpFBPase polypeptides, and use of a construct as defined hereinabove in increasing plant yield relative to control plants. The increased plant yield is in particular increased seed yield. By increased seed yield is herein taken to mean any one of the following: (i) increased seed weight; (ii) increased number of filled seeds; (iii) increased seed fill rate; and (iv) increased harvest index.

[0483] cpFBPase nucleic acid sequences or cpFBPase polypeptides may find use in breeding programmes in which a DNA marker is identified that may be genetically linked to a cpFBPase locus. The cpFBPase nucleic acid sequences or cpFBPase polypeptides may be used to define a molecular marker. This DNA or polypeptide marker may then be used in breeding programmes to select plants having increased yield. The cpFBPase gene may, for example, be a nucleic acid sequence as represented by any one of the cpFBPase nucleic acid sequences as given in Table 7, or nucleic acid sequences encoding orthologues or paralogues of any of the aforementioned SEQ ID NOs.

[0484] Allelic variants of a cpFBPase nucleic acid sequence may also find use in marker-assisted breeding programmes. Such breeding programmes sometimes require introduction of allelic variation by mutagenic treatment of the plants, using for example EMS mutagenesis; alternatively, the programme may start with a collection of allelic variants of so called “natural” origin caused unintentionally. Identification of allelic variants then takes place, for example, by PCR. This is followed by a step for selection of superior allelic variants of the sequence in question and which give increased yield. Selection is typically carried out by monitoring growth performance of plants containing different allelic variants of the sequence in question, for example, different allelic variants of any one of the cpFBPase nucleic acid sequences as given in Table 7, or nucleic acid sequences encoding orthologues or paralogues of any of the aforementioned SEQ ID NOs. Growth performance may be monitored in a greenhouse or in the field. Further optional steps include crossing plants, in which the superior allelic variant was identified, with another plant. This could be used, for example, to make a combination of interesting phenotypic features.

[0485] cpFBPase nucleic acid sequences may also be used as probes for genetically and physically mapping the genes that they are a part of, and as markers for traits linked to those genes. Such information may be useful in plant breeding in order to develop lines with desired phenotypes. Such use of cpFBPase nucleic acid sequences requires only a nucleic acid sequence of at least 15 nucleotides in length. The cpFBPase nucleic acid sequences may be used as restriction fragment length polymorphism (RFLP) markers. Southern blots (Sambrook J, Fritsch E F and Maniatis T (1989) Molecular Cloning, A Laboratory Manual) of restriction-digested plant genomic DNA may be probed with the cpFBPase nucleic acid sequences. The resulting banding patterns may then be subjected to genetic analyses using computer programs such as MapMaker (Lander et al. (1987) Genomics 1: 174-181) in order to construct a genetic map. In addition, the nucleic acid sequences may be used to probe Southern blots containing restriction endonuclease-treated genomic DNAs of a set of individuals representing parent and progeny of a defined genetic cross. Segregation of the DNA polymorphisms is noted and used to calculate the position of the cpFBPase nucleic acid sequence in the genetic map previously obtained using this population (Botstein et al. (1980) Am. J. Hum. Genet. 32:314-331).

[0486] The production and use of plant gene-derived probes for use in genetic mapping is described in Bematzky and Tanksley (1986) Plant Mol. Biol. Reporter 4: 37-41. Numerous publications describe genetic mapping of specific cDNA clones using the methodology outlined above or variations thereof. For example, F2 intercross populations, backcross populations, randomly mated populations, near isogenic lines, and other sets of individuals may be used for mapping. Such methodologies are well known to those skilled in the art.

[0487] The nucleic acid probes may also be used for physical mapping (i.e., placement of sequences on physical maps; see Hoheisel et al. In: Non-mammalian Genomic Analysis: A Practical Guide, Academic press 1996, pp. 319-346, and references cited therein).

[0488] In another embodiment, the nucleic acid probes may be used in direct fluorescence in situ hybridization (FISH) mapping (Trask (1991) Trends Genet. 7: 149-154). Although current methods of FISH mapping favor use of large clones (several kb to several hundred kb; see Laan et al. (1995) Genome Res. 5:13-20), improvements in sensitivity may allow performance of FISH mapping using shorter probes.

[0489] A variety of nucleic acid amplification-based methods for genetic and physical mapping may be carried out using the nucleic acid sequences. Examples include allele-specific amplification (Kazazian (1989) J. Lab. Clin. Med 11:95-96), polymorphism of PCR-amplified fragments (CAPS; Sheffield et al. (1993) Genomics 16:325-332), allele-specific ligation (Landegren et al. (1988) Science 241:1077-1080), nucleotide extension reactions (Sokolov (1990) Nucleic Acid Res. 18:3671), Radiation Hybrid Mapping (Walter et al. (1997) Nat. Genet. 7:22-28) and Happy Mapping (Dear and Cook (1989) Nucleic Acid Res. 17:6795-6807). For these methods, the nucleic acid sequence is used to design and produce primer pairs for use in the amplification reaction or in primer extension reactions. The design of such primers is well known to those skilled in the art. In methods employing PCR-based genetic mapping, it may be necessary to identify DNA sequence differences between the parents of the mapping cross in the region corresponding to the instant nucleic acid sequence. This, however, is generally not necessary for mapping methods.

[0490] The methods according to the present invention result in plants having increased yield relative to control plants, as described hereinbefore. These yield-enhancing traits may also be combined with other economically advantageous traits, such as further yield-enhancing traits, tolerance to various stresses, traits modifying various architectural features and/or biochemical and/or physiological features.

### Detailed Description for the SIK Polypeptide

[0491] It has now been found that modulating expression in a plant of a SIK nucleic acid and/or a SIK polypeptide gives plants having various improved yield-related traits relative to control plants, wherein overexpression of a SIK-encoding nucleic acid in a plant gives increased number of flowers per plant relative to control plants, and wherein the reduction or substantial elimination of a SIK nucleic acid gives increased thousand kernel weight, increased harvest index and increased fill rate relative to corresponding wild type plants.

[0492] Therefore, the invention provides a method for improving yield-related traits in plants relative to control plants, comprising modulating expression in a plant of a SIK nucleic acid and/or a SIK polypeptide, wherein the modulated expression is overexpression of a SIK-encoding nucleic acid in a plant resulting in an increased number of flowers per plant relative to control plants, and wherein the modulated expression is a reduction or substantial elimination of a SIK nucleic acid resulting in an increased thousand kernel weight (TKW), increased harvest index (HI) and increased fill rate relative to corresponding wild type plants.

[0493] The term “modulation” as defined herein is taken to mean a change in the level of gene expression in comparison to a control plant. In the case where a SIK-encoding nucleic acid is being used to increase the number of flowers per plant, the expression level is increased, and in the case where a SIK nucleic acid is being used to increase TKW, HI or fill rate, the expression level is decreased. The original, unmodulated expression may be of any kind of expression of a structural RNA (rRNA, tRNA) or mRNA with subsequent translation.

[0494] The term “expression” or “gene expression” means the transcription of a specific gene or specific genes or specific genetic construct. The term “expression” or “gene expression” in particular means the transcription of a gene or genes or genetic construct into structural RNA (rRNA, tRNA) or mRNA with or without subsequent translation of the latter into a protein. The process includes transcription of DNA and processing of the resulting mRNA product.

[0495] The various improved yield-related traits are improved by at least 5%, 6%, 7%, 8%, 9% or 10%, preferably at least 15% or 20%, more preferably 25%, 30%, 35%, 40%, 45%, 50%, 55%, 60%, 65% or 70% compared to control plants.

[0496] The improvement may be in one or more of the following: increased number of flowers per plant, increased seed filling rate (which as defined herein is the ratio between the number of filled seeds divided by the total number of seeds; increased harvest index, which as defined herein is the ratio of the yield of harvestable parts, such as seeds, divided by the total biomass; and increased thousand kernel weight (TKW), which as defined herein is derived by extrapolating the number of filled seeds counted and their total weight. Increased TKW may result from an increased seed size and/or seed weight, and may also result from an increase in embryo and/or endosperm size.

[0497] An increase in thousand kernel weight, increased harvest index and increased fill rate rate occurs whether the plant is under non-stress conditions or whether the plant is exposed to various stresses compared to control plants. Plants typically respond to exposure to stress by growing more slowly. In conditions of severe stress, the plant may even stop growing altogether. Mild stress on the other hand is defined herein as being any stress to which a plant is exposed which does not result in the plant ceasing to grow altogether without the capacity to resume growth. Mild stress in the sense of the invention leads to a reduction in the growth of the stressed plants of less than 40%, 35% or 30%, preferably less than 25%, 20% or 15%, more preferably less than 14%, 13%, 12%, 11% or 10% or less in comparison to the control plant under non-stress conditions. Due to advances in agricultural practices (irrigation, fertilization, pesticide treatments) severe stresses are not often encountered in cultivated crop plants. As a consequence, the compromised growth induced by mild stress is often an undesirable feature for agriculture. Mild stresses are the everyday biotic and/or abiotic (environmental) stresses to which a plant is exposed. Abiotic stresses may be due to drought or excess water, anaerobic stress, salt stress, chemical toxicity, oxidative stress and hot, cold or freezing temperatures. The abiotic stress may be an osmotic stress caused by a water stress (particularly due to drought), salt stress, oxidative stress or an ionic stress. Biotic stresses are typically those stresses caused by pathogens, such as bacteria, viruses, fungi and insects.

[0498] In particular, the methods of the present invention may be performed under non-stress conditions or under conditions of mild drought to give plants having increased thousand kernel weight, increased harvest index and increased fill rate relative to control plants. As reported in Wang et al. (Planta (2003) 218: 1-14), abiotic stress leads to a series of morphological, physiological, biochemical and molecular changes that adversely affect plant growth and productivity. Drought, salinity, extreme temperatures and oxidative stress are known to be interconnected and may induce growth and cellular damage through similar mechanisms. Rabbani et al. (Plant Physiol (2003) 133: 1755-1767) describes a particularly high degree of “cross talk” between drought stress and high-salinity stress. For example, drought and/or salinisation are manifested primarily as osmotic stress, resulting in the disruption of homeostasis and ion distribution in the cell. Oxidative stress, which frequently accompanies high or low temperature, salinity or drought stress, may cause denaturing of functional and structural proteins. As a consequence, these diverse environmental stresses often activate similar cell signalling pathways and cellular responses, such as the production of stress proteins, up-regulation of anti-oxidants, accumulation of compatible solutes and growth arrest. The term “non-stress” conditions as used herein are those environmental conditions that allow optimal growth of plants. Persons skilled in the art are aware of normal soil conditions and climatic conditions for a given location.

[0499] Performance of the methods of the invention gives plants grown under non-stress conditions or under mild drought conditions increased thousand kernel weight, increased harvest index and increased fill rate relative to control plants grown under comparable conditions. Therefore, according to the present invention, there is provided a method for increasing thousand kernel weight, increased harvest index and increased fill rate in plants grown under non-stress conditions or under mild drought conditions, which method comprises increasing expression in a plant of a nucleic acid encoding a SIK polypeptide.

[0500] Performance of the methods of the invention gives plants grown under conditions of nutrient deficiency, particularly under conditions of nitrogen deficiency, increased thousand kernel weight, increased harvest index and increased fill rate relative to control plants grown under comparable conditions. Therefore, according to the present invention, there is provided a method for increasing thousand kernel weight, increased harvest index and increased fill rate in plants grown under conditions of nutrient deficiency, which method comprises increasing expression in a plant of a nucleic acid encoding a SIK polypeptide. Nutrient deficiency may result from a lack of nutrients such as nitrogen, phosphates and other phosphorous-containing compounds, potassium, calcium, cadmium, magnesium, manganese, iron and boron, amongst others.

[0501] The present invention encompasses plants or parts thereof (including seeds) obtainable by the methods according to the present invention. The plants or parts thereof comprise a nucleic acid transgene encoding a SIK polypeptide as defined above.

[0502] According to one aspect of the present invention, a reduction or substantial elimination of a SIK nucleic acid results in one or more of an increased thousand kernel weight (TKW), increased harvest index (HI) and increased fill rate relative to control plants.

[0503] Reference herein to a “SIK nucleic acid” is taken to mean a polymeric form of a deoxyribonucleotide or a ribonucleotide polymer of any length, either double- or single-stranded, or analogues thereof, that has the essential characteristic of a natural ribonucleotide in that it can hybridise to SIK nucleic acid sequences in a manner similar to naturally occurring polynucleotides.

[0504] Reference herein to “a reduction or substantial elimination of a SIK nucleic acid or gene” and to an “endogenous” SIK gene is as described in the definitions section.

[0505] For the reduction or substantial elimination of expression an endogenous SIK gene in a plant, a sufficient length of substantially contiguous nucleotides of a SIK nucleic acid sequence is required. The stretch of substantially contiguous nucleotides may be derived from any SIK nucleic acid, preferably a SIK nucleic acid represented by any one of SEQ ID NO 213 to 225 or any one of the nucleic acid sequences given in Table 8 or Table 9 below. A SIK nucleic acid sequence encoding a (functional) polypeptide is not a requirement for the various methods discussed herein for the reduction or substantial elimination of expression of an endogenous SIK gene.

[0506] This reduction or substantial elimination may be achieved using routine tools and techniques, as described above. A preferred method for the reduction or substantial elimination of expression of a SIK nucleic acid is by introducing and expressing in a plant a genetic construct into which the SIK nucleic acid is cloned as an inverted repeat (in part or completely), separated by a spacer (non-coding DNA).

[0507] According to another aspect of the present invention, overexpression in a plant of a SIK-encoding nucleic acid results in an increased number of flowers per plant relative to control plants.

[0508] A preferred method for overexpression of a SIK-encoding nucleic acid is by introducing and expressing in a plant a nucleic acid encoding a SIK polypeptide as defined below.

[0509] A “SIK-encoding nucleic acid” encodes a “SIK polypeptide” or “SIK amino acid sequence” which as defined herein is taken to mean a polypeptide according to SEQ ID NO: 210 and orthologues and paralogues thereof as defined herein.

[0510] The SIK polypeptide represented by SEQ ID NO: 210 and orthologues and paralogues thereof may typically also comprise the following features.

### ATP-Binding Region

[0511] ATP-binding region VSESLTSTSYKASFRDDFTDPKTIEAIVSRL (Motif 1) or an ATP-binding region having in increasing order of preference at least 40%, 41%, 42%, 43%, 44%, 45%, 46%, 47%, 48%, 49%, 50%, 51%, 52%, 53%, 54%, 55%, 56%, 57%, 58%, 59%, 60%, 81%, 62%, 63%, 64%, 65%, 66%, 67%, 68%, 69%, 70%, 71%, 72%, 73%, 74%, 75%, 76%, 77%, 78%, 79%, 80%, 81%, 82%, 83%, 84%, 85%, 86%, 87%, 88%, 89%, 90%, 91%, 92%, 93%, 94%, 95%, 96%, 97%, 98%, 99% identity to Motif I.

### Serine Threonine Kinase Active Site Signature

[0512] Serine threonine kinase active site signature AMYNDFSTSNIQI with conserved D residue (Motif 2) or a serine threonine kinase active site signature having in increasing order of preference at least 40%, 41%, 42%, 43%, 44%, 45%, 46%, 47%, 48%, 49%, 50%, 51%, 52%, 53%, 54%, 55%, 56%, 57%, 58%, 59%, 60%, 61%, 62%, 63%, 64%, 65%, 66%, 67%, 68%, 69%, 70%, 71%, 72%, 73%, 74%, 75%, 76%, 77%, 78%, 79%, 80%, 81%, 82%, 83%, 84%, 85%, 86%, 87%, 88%, 89%, 90%, 91%, 92%, 93%, 94%, 95%, 96%, 97%, 98%, 99% identity to Motif II.

### Serine-Rich Domain

[0513] An N-terminal serine-rich domain.

### Myristoylation Sites

[0514] The orthologues and paralogues may further comprise one or more myristoylation sites that could serve to anchor the protein to the membrane.

### Kinase Activity

[0515] Furthermore, the SIK orthologues and paralogues will exhibit kinase activity of which can readily be determined using routine tools and techniques. Several assays are available (for example Current Protocols in Molecular Biology, Volumes 1 and 2, Ausubel et al. (1994), Current Protocols; or online such as http://www.protocol-online.org).

[0516] In brief, the kinase assay generally involves (1) bringing the kinase protein into contact with a substrate polypeptide containing the target site to be phosphorylated; (2) allowing phosphorylation of the target site in an appropriate kinase buffer under appropriate conditions;

[0517] (3) separating phosphorylated products from non-phosphorylated substrate after a suitable reaction period. The presence or absence of kinase activity is determined by the presence or absence of a phosphorylated target. In addition, quantitative measurements may be performed.

[0518] Purified SIK proteins, or cell extracts containing or enriched in the SIK protein could be used as source for the kinase protein. As a substrate, small peptides are particularly well suited. The peptide must comprise one or more serine, threonine, or tyrosine residues in a phosphorylation site motif. A compilation of phosphorylation sites may be found in Biochimica et Biophysica Acta 1314, 191-225, (1996). In addition, the peptide substrates may advantageously have a net positive charge to facilitate binding to phosphocellulose filters, (allowing to separate the phosphorylated from non-phosphorylated peptides and to detect the phosphorylated peptides). If a phosphorylation site motif is not known, a general tyrosine kinase substrate may be used. For example, “Src-related peptide” (RRLIEDAEYAARG) is a substrate for many receptor and non-receptor tyrosine kinases). To determine the kinetic parameters for phosphorylation of the synthetic peptide, a range of peptide concentrations is required. For initial reactions, a peptide concentration of 0.7-1.5 mM may be used.

[0519] For each kinase enzyme, it is important to determine the optimal buffer, ionic strength, and pH for activity. A standard 5× Kinase Buffer generally contains 5 mg/ml BSA (Bovine Serum Albumin preventing kinase adsorption to the assay tube), 150 mM Tris-CI (pH 7.5), 100 mM MgCl₂. Divalent cations are required for most tyrosine kinases, although some tyrosine kinases (for example, insulin-, IGF-1-, and PDGF receptor kinases) require MnCl₂ instead of MgCl₂ (or in addition to MgCl₂). The optimal concentrations of divalent cations must be determined empirically for each protein kinase.

[0520] A commonly used donor of the phophoryl group is radio-labelled [gamma-³²P]ATP (normally at 0.2 mM final concentration). The amount of ³²P incorporated in the peptides may be determined by measuring activity on the nitrocellulose dry pads in a scintillation counter.

[0521] Alternatively or additionally, the activity of a SIK orthologue or paralogue may be assayed by overexpression in a plant of a nucleic acid encoding a SIK polypeptide under the control of a constitutive promoter to check for increase the number of flowers per plant relative to control plants, and also by the reduction or substantial elimination of a SIK nucleic acid under the control of a constitutive promoter to check for one or more of an increase in thousand kernel weight (TKW), harvest index (HI) and fill rate in plants relative to control plants.

[0522] The invention is illustrated by transforming plants with the Oryza sativa sequence represented by SEQ ID NO: 209, encoding the polypeptide sequence of SEQ ID NO: 210, however performance of the invention is not restricted to these sequences. The methods of the invention may advantageously be performed using any nucleic acid encoding a SIK polypeptide as defined herein, such as any of the nucleic acid sequences given in Table 8 and Table 9. The examples of orthologues and paralogues of SEQ ID NO: 210 given in Table 8 and Table 9 were obtained from The Institute of Genetic research (TIGR). The % identity given in Table 9 is on a nucleotide level. The accession number given starting with ‘TO’ identifies the sequence as found through TIGR. In case of partial nucleic acids, it would be well within the capabilities of a person skilled in the art to obtain the full length sequence (or at least a sufficient length of sequence for performing the methods of the invention).

TABLE 8
Examples of putative SIK orthologues and paralogues

| # | TC | Putative function |
|---|---|---|
| 1 | Arabidopsis\|TC272322 | (Q9C9Y3) Hypothetical protein F17O14.23 |
| 2 | Barley\|TC134680 | (Q8RUD7) Similar to protein kinase AtSIK (P0485B12.21 protein) |
| 3 | Cotton\|TC30779 | (Q9C9Y3) Hypothetical protein F17O14.23 |
| 4 | Grape\|TC43027 | (Q94CI5) Protein kinase AtSIK |
| 5 | L. japonicus\|TC17767 | (Q94CI5) Protein kinase AtSIK |
| 6 | Lettuce\|TC15801 | protein kinase AtSIK |
| 7 | Maize\|TC255367 | (Q8RUD7) Similar to protein kinase AtSIK (P0485B12.21 protein) |
| 8 | Maize\|TC272965 | (Q8RUD7) Similar to protein kinase AtSIK (P0485B12.21 protein) |
| 9 | Medicago\|TC96175 | (Q9C9Y3) Hypothetical protein F17O14.23 |
| 10 | Pepper\|TC5595 | (Q94CI5) Protein kinase AtSIK |
| 11 | Potato\|TC117743 | Protein kinase domain putative |
| 12 | Rice\|TC268277 | (Q8RUD7) Similar to protein kinase AtSIK (P0485B12.21 protein) |
| 13 | S. officinarum\|TC67974 | (Q8RUD7) Similar to protein kinase AtSIK (P0485B12.21 protein) |
| 14 | Sorghum\|TC103780 | (Q8RUD7) Similar to protein kinase AtSIK (P0485B12.21 protein) |
| 15 | Soybean\|TC229774 | (Q94CI5) Protein kinase AtSIK |
| 16 | Tomato\|TC158378 | 68416.m01018 protein kinase family protein contains protein kinase |
| | | domain Pfam:PF00069 |
| 17 | Tomato\|TC166426 | 68416.m01018 protein kinase family protein contains protein kinase |
| | | domain Pfam:PF00069 |
| 18 | Wheat\|TC257477 | (Q8RUD7) Similar to protein kinase AtSIK (P0485B12.21 protein) |

TABLE 9
Examples of putative SIK orthologues and paralogues.

| | | % | Match | | Recip. |
|---|---|---|---|---|---|
| Sequence 1 | Sequence 2 | Identity | length | p-value | best hits |
| Barley\|TC134680 | Arabidopsis\|TC272322 | 63 | 1030 | 6.80E−66 | * |
| Cotton\|TC30779 | Arabidopsis\|TC272322 | 71 | 1008 | 9.40E−103 | * |
| Cotton\|TC30779 | Barley\|TC134680 | 68 | 971 | 8.30E−80 | * |
| Grape\|TC43027 | Arabidopsis\|TC272322 | 60 | 619 | 4.30E−25 | * |
| Grape\|TC43027 | Cotton\|TC30779 | 80 | 245 | 5.60E−29 | * |
| Grape\|TC43027 | Maize\|TC272965 | 58 | 483 | 3.20E−13 | * |
| Grape\|TC43027 | Rice\|TC268277 | 66 | 318 | 3.50E−19 | * |
| Grape\|TC43027 | S. officinarum\|TC67974 | 63 | 372 | 2.40E−17 | * |
| Grape\|TC43027 | Soybean\|TC229774 | 77 | 276 | 4.60E−30 | * |
| Grape\|TC43027 | Tomato\|TC158378 | 69 | 420 | 9.20E−33 | * |
| Grape\|TC43027 | Tomato\|TC166426 | 75 | 241 | 1.80E−23 | |
| L. japonicus\|TC17767 | Arabidopsis\|TC272322 | 72 | 659 | 1.30E−64 | * |
| L. japonicus\|TC17767 | Barley\|TC134680 | 67 | 659 | 4.40E−53 | * |
| L. japonicus\|TC17767 | Cotton\|TC30779 | 80 | 654 | 9.20E−89 | * |
| Lettuce\|TC15801 | Arabidopsis\|TC272322 | 69 | 529 | 8.90E−44 | * |
| Lettuce\|TC15801 | Cotton\|TC30779 | 77 | 501 | 1.20E−58 | * |
| Lettuce\|TC15801 | L. japonicus\|TC17767 | 75 | 412 | 2.20E−45 | * |
| Maize\|TC255367 | Arabidopsis\|TC272322 | 62 | 528 | 5.50E−24 | * |
| Maize\|TC255367 | Barley\|TC134680 | 81 | 451 | 1.10E−60 | * |
| Maize\|TC255367 | Cotton\|TC30779 | 63 | 738 | 6.90E−44 | * |
| Maize\|TC255367 | L. japonicus\|TC17767 | 66 | 366 | 2.20E−24 | * |
| Maize\|TC255367 | Lettuce\|TC15801 | 65 | 455 | 4.10E−30 | * |
| Maize\|TC272965 | Barley\|TC134680 | 68 | 623 | 2.90E−43 | |
| Medicago\|TC96175 | Arabidopsis\|TC272322 | 67 | 1245 | 2.70E−102 | * |
| Medicago\|TC96175 | Barley\|TC134680 | 65 | 1069 | 2.50E−75 | * |
| Medicago\|TC96175 | Cotton\|TC30779 | 76 | 1041 | 2.20E−125 | * |
| Medicago\|TC96175 | L. japonicus\|TC17767 | 89 | 666 | 3.50E−114 | * |
| Medicago\|TC96175 | Lettuce\|TC15801 | 73 | 504 | 1.00E−51 | * |
| Medicago\|TC96175 | Maize\|TC255367 | 62 | 813 | 3.60E−41 | * |
| Pepper\|TC5595 | Arabidopsis\|TC272322 | 66 | 696 | 6.40E−49 | * |
| Pepper\|TC5595 | Barley\|TC134680 | 66 | 510 | 2.90E−38 | * |
| Pepper\|TC5595 | Cotton\|TC30779 | 76 | 553 | 1.60E−66 | * |
| Pepper\|TC5595 | L. japonicus\|TC17767 | 75 | 474 | 4.50E−53 | * |
| Pepper\|TC5595 | Lettuce\|TC15801 | 75 | 541 | 3.30E−60 | * |
| Pepper\|TC5595 | Maize\|TC255367 | 66 | 462 | 1.00E−29 | * |
| Pepper\|TC5595 | Medicago\|TC96175 | 67 | 800 | 1.30E−60 | * |
| Potato\|TC117743 | Arabidopsis\|TC272322 | 64 | 1082 | 8.80E−65 | * |
| Potato\|TC117743 | Barley\|TC134680 | 66 | 565 | 1.30E−39 | * |
| Potato\|TC117743 | Cotton\|TC30779 | 77 | 587 | 1.80E−70 | * |
| Potato\|TC117743 | L. japonicus\|TC17767 | 75 | 496 | 3.60E−54 | * |
| Potato\|TC117743 | Lettuce\|TC15801 | 77 | 543 | 2.30E−65 | * |
| Potato\|TC117743 | Maize\|TC255367 | 67 | 444 | 1.30E−33 | * |
| Potato\|TC117743 | Medicago\|TC96175 | 68 | 804 | 4.20E−64 | * |
| Potato\|TC117743 | Pepper\|TC5595 | 82 | 826 | 1.60E−121 | * |
| Rice\|TC268277 | Arabidopsis\|TC272322 | 63 | 1019 | 3.10E−66 | * |
| Rice\|TC268277 | Barley\|TC134680 | 78 | 1371 | 5.70E−179 | * |
| Rice\|TC268277 | Cotton\|TC30779 | 64 | 1436 | 3.40E−101 | * |
| Rice\|TC268277 | L. japonicus\|TC17767 | 70 | 656 | 1.90E−61 | * |
| Rice\|TC268277 | Maize\|TC255367 | 81 | 860 | 4.50E−121 | * |
| Rice\|TC268277 | Maize\|TC272965 | 74 | 646 | 4.00E−68 | |
| Rice\|TC268277 | Medicago\|TC96175 | 63 | 1684 | 3.00E−104 | * |
| Rice\|TC268277 | Pepper\|TC5595 | 65 | 600 | 5.50E−40 | * |
| Rice\|TC268277 | Potato\|TC117743 | 65 | 691 | 3.80E−45 | * |
| S. officinarum\|TC67974 | Arabidopsis\|TC272322 | 63 | 938 | 1.50E−59 | * |
| S. officinarum\|TC67974 | Barley\|TC134680 | 76 | 1294 | 2.60E−151 | * |
| S. officinarum\|TC67974 | Cotton\|TC30779 | 66 | 876 | 5.10E−70 | * |
| S. officinarum\|TC67974 | L. japonicus\|TC17767 | 69 | 656 | 4.70E−57 | * |
| S. officinarum\|TC67974 | Lettuce\|TC15801 | 66 | 390 | 4.70E−28 | * |
| S. officinarum\|TC67974 | Maize\|TC255367 | 96 | 367 | 2.80E−72 | |
| S. officinarum\|TC67974 | Maize\|TC272965 | 90 | 649 | 2.20E−112 | * |
| S. officinarum\|TC67974 | Medicago\|TC96175 | 64 | 1140 | 7.80E−75 | * |
| S. officinarum\|TC67974 | Pepper\|TC5595 | 66 | 471 | 1.80E−33 | * |
| S. officinarum\|TC67974 | Potato\|TC117743 | 67 | 460 | 1.00E−35 | * |
| S. officinarum\|TC67974 | Rice\|TC268277 | 82 | 1338 | 1.20E−194 | * |
| S. officinarum\|TC67974 | Sorghum\|TC103780 | 95 | 1359 | 8.70E−277 | * |
| S. officinarum\|TC67974 | Soybean\|TC229774 | 70 | 750 | 1.70E−67 | * |
| Sorghum\|TC103780 | Arabidopsis\|TC272322 | 63 | 1057 | 1.40E−65 | * |
| Sorghum\|TC103780 | Barley\|TC134680 | 75 | 1421 | 5.10E−163 | * |
| Sorghum\|TC103780 | Cotton\|TC30779 | 64 | 1333 | 8.60E−91 | * |
| Sorghum\|TC103780 | L. japonicus\|TC17767 | 69 | 656 | 6.40E−57 | * |
| Sorghum\|TC103780 | Lettuce\|TC15801 | 64 | 493 | 3.70E−30 | * |
| Sorghum\|TC103780 | Maize\|TC255367 | 92 | 948 | 1.70E−180 | * |
| Sorghum\|TC103780 | Maize\|TC272965 | 89 | 651 | 2.40E−110 | |
| Sorghum\|TC103780 | Medicago\|TC96175 | 62 | 1653 | 5.10E−96 | * |
| Sorghum\|TC103780 | Pepper\|TC5595 | 64 | 580 | 2.60E−36 | * |
| Sorghum\|TC103780 | Potato\|TC117743 | 65 | 602 | 6.50E−39 | * |
| Sorghum\|TC103780 | Rice\|TC268277 | 80 | 1852 | 1.40E−260 | * |
| Soybean\|TC229774 | Arabidopsis\|TC272322 | 72 | 757 | 1.10E−77 | * |
| Soybean\|TC229774 | Barley\|TC134680 | 69 | 756 | 5.70E−67 | * |
| Soybean\|TC229774 | Cotton\|TC30F779 | 78 | 737 | 3.40E−96 | * |
| Soybean\|TC229774 | L. japonicus\|TC17767 | 90 | 495 | 4.10E−87 | * |
| Soybean\|TC229774 | Lettuce\|TC15801 | 77 | 249 | 1.90E−26 | * |
| Soybean\|TC229774 | Maize\|TC255367 | 71 | 203 | 2.00E−15 | * |
| Soybean\|TC229774 | Medicago\|TC96175 | 87 | 717 | 2.10E−118 | * |
| Soybean\|TC229774 | Pepper\|TC5595 | 76 | 308 | 1.50E−32 | * |
| Soybean\|TC229774 | Potato\|TC117743 | 76 | 332 | 1.80E−35 | * |
| Soybean\|TC229774 | Rice\|TC268277 | 71 | 744 | 4.20E−74 | * |
| Soybean\|TC229774 | Sorghum\|TC103780 | 69 | 757 | 1.30E−65 | * |
| Tomato\|TC158378 | Arabidopsis\|TC272322 | 71 | 686 | 3.10E−64 | * |
| Tomato\|TC158378 | Barley\|TC134680 | 65 | 907 | 8.80E−63 | * |
| Tomato\|TC158378 | Cotton\|TC30779 | 78 | 669 | 2.90E−86 | * |
| Tomato\|TC158378 | L. japonicus\|TC17767 | 78 | 427 | 1.70E−52 | * |
| Tomato\|TC158378 | Lettuce\|TC15801 | 81 | 181 | 3.90E−21 | |
| Tomato\|TC158378 | Maize\|TC272965 | 60 | 428 | 4.80E−14 | * |
| Tomato\|TC158378 | Medicago\|TC96175 | 68 | 908 | 4.60E−76 | * |
| Tomato\|TC158378 | Pepper\|TC5595 | 84 | 243 | 6.40E−34 | |
| Tomato\|TC158378 | Potato\|TC117743 | 96 | 264 | 8.90E−50 | * |
| Tomato\|TC158378 | Rice\|TC268277 | 66 | 897 | 1.70E−64 | * |
| Tomato\|TC158378 | S. officinarum\|TC67974 | 65 | 906 | 2.40E−60 | * |
| Tomato\|TC158378 | Soybean\|TC229774 | 74 | 700 | 4.80E−78 | * |
| Tomato\|TC166426 | Arabidopsis\|TC272322 | 70 | 675 | 1.80E−62 | |
| Tomato\|TC166426 | Barley\|TC134680 | 67 | 680 | 1.40E−54 | |
| Tomato\|TC166426 | Cotton\|TC30779 | 77 | 679 | 3.80E−85 | |
| Tomato\|TC166426 | L. japonicus\|TC17767 | 77 | 440 | 1.30E−50 | |
| Tomato\|TC166426 | Lettuce\|TC15801 | 81 | 193 | 6.50E−23 | * |
| Tomato\|TC166426 | Medicago\|TC96175 | 73 | 675 | 1.30E−69 | |
| Tomato\|TC166426 | Pepper\|TC5595 | 95 | 255 | 1.10E−46 | * |
| Tomato\|TC166426 | Potato\|TC117743 | 85 | 276 | 2.40E−39 | |
| Tomato\|TC166426 | Rice\|TC268277 | 67 | 680 | 2.70E−55 | |
| Tomato\|TC166426 | S. officinarum\|TC67974 | 67 | 680 | 4.90E−53 | |
| Tomato\|TC166426 | Sorghum\|TC103780 | 67 | 680 | 1.60E−53 | * |
| Tomato\|TC166426 | Soybean\|TC229774 | 73 | 680 | 2.30E−72 | |
| Wheat\|TC257477 | Barley\|TC134680 | 91 | 672 | 7.00E−119 | * |
| Wheat\|TC257477 | Maize\|TC272965 | 69 | 639 | 2.80E−49 | * |
| Wheat\|TC257477 | Rice\|TC268277 | 68 | 647 | 4.10E−47 | * |
| Wheat\|TC257477 | S. officinarum\|TC67974 | 67 | 648 | 4.10E−46 | * |
| Wheat\|TC257477 | Sorghum\|TC103780 | 69 | 648 | 4.20E−49 | * |
| Wheat\|TC257477 | Tomato\|TC158378 | 61 | 441 | 1.20E−18 | * |

[0523] Orthologous and paralogous SIK polypeptides may readily be found, and nucleic acids encoding such orthologues and paralogues would be useful in performing the methods of the invention.

[0524] Orthologues and paralogues may easily be found by performing a so-called reciprocal blast search. Typically this involves a first BLAST involving BLASTing a query sequence (for example, SEQ ID NO: 209 or SEQ ID NO: 210) against any sequence database, such as the publicly available NCB! database which may be found at: http://www.ncbi.nlm.nih.gov. BLASTN or TBLASTX (using standard default values) are generally used when starting from a nucleotide sequence, and BLASTP or TBLASTN (using standard default values) when starting from a protein sequence. The BLAST results may optionally be filtered. The full-length sequences of either the filtered results or non-filtered results are then BLASTed back (second BLAST) against sequences from the organism from which the query sequence is derived (where the query sequence is SEQ ID NO: 209 or SEQ ID NO: 210, the second BLAST would therefore be against Oryza sequences). The results of the first and second BLASTs are then compared. A paralogue is identified if a high-ranking hit from the first blast is from the same species as from which the query sequence is derived, a BLAST back then ideally results in the query sequence being among the highest hits; an orthologue is identified if a high-ranking hit in the first BLAST is not from the same species as from which the query sequence is derived, and preferably results upon BLAST back in the query sequence being among the highest hits.

[0525] High-ranking hits are those having a low E-value. The lower the E-value, the more significant the score (or in other words the lower the chance that the hit was found by chance). Computation of the E-value is well known in the art. In addition to E-values, comparisons are also scored by percentage identity. Percentage identity refers to the number of identical nucleotides (or amino acids) between the two compared nucleic acid (or polypeptide) sequences over a particular length. Preferably the score is greater than 50, more preferably greater than 100; and preferably the E-value is less than e-5, more preferably less than e-6. In the case of large families, ClustalW may be used, followed by a neighbour joining tree, to help visualize clustering of related genes and to identify orthologues and paralogues.

[0526] Orthologues and paralogues may also be identified using the BLAST procedure described below. Homologues (or homologous proteins, encompassing orthologues and paralogues) may readily be identified using routine techniques well known in the art, such as by sequence alignment. Methods for the alignment of sequences for comparison are well known in the art, such methods include GAP, BESTFIT, BLAST, FASTA and TFASTA. GAP uses the algorithm of Needleman and Wunsch ((1970) J Mol Biol 48: 443-453) to find the alignment of two complete sequences that maximizes the number of matches and minimizes the number of gaps. The BLAST algorithm (Altschul et al. (1990) J Mol Biol 215: 403-410) calculates percent sequence identity and performs a statistical analysis of the similarity between the two sequences. The software for performing BLAST analysis is publicly available through the National Centre for Biotechnology Information. Homologues may readily be identified using, for example, the ClustalW multiple sequence alignment algorithm (version 1.83), with the default pairwise alignment parameters, and a scoring method in percentage. Global percentages of similarity and identity may also be determined using one of the methods available in the MatGAT software package (Campanella et al., BMC Bioinformatics. 4, 29, 2003). Minor manual editing may be performed to optimise alignment between conserved motifs, as would be apparent to a person skilled in the art. Furthermore, instead of using full-length sequences for the identification of homologues, specific domains may be used as well. The sequence identity values, which are indicated below as a percentage were determined over the entire SIK nucleic acid or amino acid sequence using the programs mentioned above using the default parameters.

[0527] Preferably, the SIK polypeptides encoded by the SIK-encoding nucleic acids useful in the methods of the present invention have, in increasing order of preference, at least 40%, 41%, 42%, 43%, 44%, 45%, 46%, 47%, 48%, 49%, 50%, 51%, 52%, 53%, 54%, 55%, 56%, 57%, 58%, 59%, 60%, 61%, 62%, 63%, 64%, 65%, 66%, 67%, 68%, 69%, 70%, 71%, 72%, 73%, 74%, 75%, 76%, 77%, 78%, 79%, 80%, 81%, 82%, 83%, 84%, 85%, 86%, 87%, 88%, 89%, 90%, 91%, 92%, 93%, 94%, 95%, 96%, 97%, 98%, 99% identity to the polypeptide of SEQ ID NO: 210.

[0528] Alternatively, the sequence identity among homologues may be determined using a specific domain. Any given domain may be identified and delineated using the databases and tools for protein identification listed above, and/or methods for the alignment of sequences for comparison. In some instances, default parameters may be adjusted to modify the stringency of the search. For example using BLAST, the statistical significance threshold (called “expect” value) for reporting matches against database sequences may be increased to show less stringent matches. In this way, short nearly exact matches may be identified.

[0529] The SIK polypeptides may be identifiable by the presence of an ATP-binding region, a serine threonine kinase active site signature, an N-terminal serine-rich domain and one or more myristoylation sites. The terms “domain” and “motif” are defined above. Specialist databases exist for the identification of domains, such as SMART (Schultz et al. (1998) Proc. Natl. Acad. Sci. USA 95, 5857-5864; Letunic et al. (2002) Nucleic Acids Res 30, 242-244), InterPro (Mulder et al., (2003) Nucl. Acids. Res. 31, 315-318), Prosite (Bucher and Bairoch (1994), A generalized profile syntax for biomolecular sequences motifs and its function in automatic sequence interpretation. (In) ISMB-94; Proceedings 2nd International Conference on Intelligent Systems for Molecular Biology. Altman R., Brutlag D., Karp P., Lathrop R., Searls D., Eds., pp. 53-61, AAAI Press, Menlo Park; Hulo et al., Nucl. Acids. Res. 32:D134-D137, (2004)) or Pfam (Bateman et al., Nucleic Acids Research 30(1): 276-280 (2002)). A set of tools for in silico analysis of protein sequences is available on the ExPASY proteomics server (hosted by the Swiss Institute of Bioinformatics (Gasteiger et al., ExPASy: the proteomics server for in-depth protein knowledge and analysis, Nucleic Acids Res. 31:3784-3788 (2003)). However, the various domains may also easily be identified upon sequence alignment of a putative SIK polypeptide with SIK polypeptides known in the art.

[0530] Also useful in the methods of the invention are nucleic acids encoding homologues of a SIK polypeptide represented by SEQ ID NO: 210 or orthologues or paralogues thereof as defined above.

[0531] Also useful in the methods of the invention are nucleic acids encoding derivatives of SEQ ID NO: 210 or nucleic acids encoding derivatives of orthologues, paralogues or homologues of SEQ ID NO: 210.

[0532] Nucleic acids encoding SIK polypeptides defined herein need not be full-length nucleic acids, since performance of the methods of the invention does not rely on the use of full length nucleic acid sequences. Examples of nucleic acids suitable for use in performing the methods of the invention include the nucleic acid sequences given in Table 8 and Table 9, but are not limited to those sequences. Nucleic acid variants may also be useful in practising the methods of the invention. Examples of such nucleic acid variants include portions of nucleic acids encoding a SIK polypeptide as defined herein, splice variants of nucleic acids encoding a SIK polypeptide as defined herein, allelic variants of nucleic acids encoding a SIK polypeptide as defined herein and variants of nucleic acids encoding a SIK polypeptide as defined herein that are obtained by gene shuffling. The terms portion, splice variant, allelic variant and gene shuffling are as described herein.

[0533] According to the present invention, there is provided a method for increasing the number of flowers per plant relative to control plants, comprising introducing and expressing in a plant a portion of any one of the nucleic acid sequences given in Table 8 or Table 9, or a portion of a nucleic acid encoding an orthologue, paralogue or homologue of any of the amino acid sequences given in Table 8 or Table 9.

[0534] Portions useful in the methods of the invention, encode a polypeptide having substantially the same biological activity as the SIK polypeptide represented by any of the amino acid sequences given in Table 8 or Table 9. Preferably, the portion is a portion of any one of the nucleic acids given in Table 8 or Table 9, or a portion of any one of the nucleic acids sequences represented by SEQ ID NO: 213 to 225. The portion is typically at least 300 consecutive nucleotides in length, preferably at least 400 consecutive nucleotides in length, more preferably at least 500 consecutive nucleotides in length, the consecutive nucleotides being of any one of the nucleic acid sequences given in Table 8 or Table 9 or any one of the nucleic acids sequences represented by SEQ ID NO: 213 to 225. Most preferably the portion is a portion of the nucleic acid of SEQ ID NO: 209. Preferably, the portion encodes an amino acid sequence comprising any one or more of an ATP-binding region, a serine threonine kinase active site signature, an N-terminal serine-rich domain, one or more myristoylation sites and kinase activity.

[0535] A portion of a nucleic acid encoding a SIK polypeptide as defined herein may be prepared, for example, by making one or more deletions to the nucleic acid. The portions may be used in isolated form or they may be fused to other coding (or non coding) sequences in order to, for example, produce a protein that combines several activities. When fused to other coding sequences, the resultant polypeptide produced upon translation may be bigger than that predicted for the portion.

[0536] Another nucleic acid variant useful in the methods of the invention is a nucleic acid capable of hybridising, under reduced stringency conditions, preferably under stringent conditions, with a nucleic acid encoding a SIK polypeptide as defined herein, or with a portion as defined herein.

[0537] Hybridising sequences useful in the methods of the invention, encode a polypeptide having substantially the same biological activity as the SIK polypeptide represented by any of the amino acid sequences given in Table 8 or Table 9. The hybridising sequence is typically at least 300 consecutive nucleotides in length, preferably at least 400 consecutive nucleotides in length, more preferably at least 500 consecutive nucleotides in length, the consecutive nucleotides being of any one of the nucleic acid sequences given in Table 8 or Table 9. Preferably, the hybridising sequence is one that is capable of hybridising to any of the nucleic acids given in Table 8 or Table 9, or to a portion of any of these sequences, a portion being as defined above. Most preferably, the hybridising sequence is capable of hybridising to a nucleic acid as represented by SEQ ID NO: 209 or to a portion thereof. Preferably, the hybridising sequence encodes an amino acid sequence comprising any one or more of an ATP-binding region, a serine threonine kinase active site signature, an N-terminal serine-rich domain, one or more myristoylation sites and kinase activity.

[0538] According to the present invention, there is provided a method for increasing the number of flowers per plant, comprising introducing and expressing in a plant a nucleic acid capable of hybridizing to any one of the nucleic acids given in Table 8 or Table 9 or any one of the nucleic acids sequences represented by SEQ ID NO: 213 to 225, or comprising introducing and expressing in a plant a nucleic acid capable of hybridising to a nucleic acid encoding an orthologue, paralogue or homologue of any of the nucleic acid sequences given in Table 1 or Table 2 or any one of the nucleic acids sequences represented by SEQ ID NO: 213 to 225.

[0539] Another nucleic acid variant useful in the methods of the invention is a splice variant encoding a SIK polypeptide as defined hereinabove, the term “splice variant” being as defined above.

[0540] According to the present invention, there is provided a method for increasing the number of flowers per plant, comprising introducing and expressing in a plant a splice variant of any one of the nucleic acid sequences given in Table 8 or Table 9 or a splice variant of any one of the nucleic acids represented by SEQ ID NO: 213 to 225, or a splice variant of a nucleic acid encoding an orthologue, paralogue or homologue of any of the amino acid sequences given in Table 8 or Table 9 or any one of the nucleic acids sequences represented by SEQ ID NO: 213 to 225.

[0541] Preferred splice variants are splice variants of a nucleic acid represented by SEQ ID NO: 209 or a splice variant encoding an orthologue or paralogue of SEQ ID NO: 210. Preferably, the amino acid encoded by the splice variant comprises any one or more of an ATP-binding region, a serine threonine kinase active site signature, an N-terminal serine-rich domain, one or more myristoylation sites and kinase activity.

[0542] Another nucleic acid variant useful in performing the methods of the invention is an allelic variant of a nucleic acid encoding a SIK polypeptide as defined hereinabove.

[0543] According to the present invention, there is provided a method for increasing the number of flowers per plant, comprising introducing and expressing in a plant an allelic variant of any one of the nucleic acids given in Table 8 or Table 9 or of any one of the nucleic acid sequences represented by SEQ ID NO: 213 to 225, or comprising introducing and expressing in a plant an allelic variant of a nucleic acid encoding an orthologue, paralogue or homologue of any of the amino acid sequences given in Table 8 or Table 9 or of any one of the nucleic acids sequences represented by SEQ ID NO: 213 to 225.

[0544] Preferably, the allelic variant is an allelic variant of SEQ ID NO: 209 or an allelic variant of a nucleic acid encoding an orthologue or paralogue or homologue of SEQ ID NO: 210. Preferably, the amino acid encoded by the allelic variant comprises any one or more of an ATP-binding region, a serine threonine kinase active site signature, an N-terminal serine-rich domain, one or more myristoylation sites and kinase activity.

[0545] A further nucleic acid variant useful in the methods of the invention is a nucleic acid variant obtained by gene shuffling. Gene shuffling or directed evolution may also be used to generate variants of nucleic acids encoding SIK polypeptides.

[0546] According to the present invention, there is provided a method for increasing the number of flowers per plant, comprising introducing and expressing in a plant a variant of any one of the nucleic acid sequences given in Table Table 8 or Table 9, or of any one of the nucleic acids sequences represented by SEQ ID NO: 213 to 225, or comprising introducing and expressing in a plant a variant of a nucleic acid encoding an orthologue, paralogue or homologue of any of the amino acid sequences given in Table 8 or Table 9 or of any one of the nucleic acids sequences represented by SEQ ID NO: 213 to 225, which variant nucleic acid is obtained by gene shuffling. Preferably, the variant nucleic acid obtained by gene shuffling encodes an amino acid comprising any one or more of an ATP-binding region, a serine threonine kinase active site signature, an N-terminal serine-rich domain, one or more myristoylation sites and kinase activity.

[0547] Furthermore, nucleic acid variants may also be obtained by site-directed mutagenesis. Several methods are available to achieve site-directed mutagenesis, the most common being PCR based methods (current protocols in molecular biology. Wiley Eds.

[0548] SIK nucleic acids encoding SIK-like polypeptides may be derived from any natural or artificial source. The SIK nucleic acid may be modified from its native form in composition and/or genomic environment through deliberate human manipulation. Preferably the SIK-encoding nucleic acid is from a plant, further preferably from a monocotyledonous plant, more preferably from the family of Poaceae, most preferably the nucleic acid is from Oryza sativa.

[0549] Any reference herein to a SIK polypeptide is therefore taken to mean a SIK polypeptide as defined above. Any SIK nucleic acid encoding such a SIK polypeptide is suitable for use in performing the methods of the invention to increase the number of flowers per plant.

[0550] The present invention also encompasses plants or parts thereof (including seeds) obtainable by the methods according to the present invention. The plants or parts thereof comprise a nucleic acid transgene encoding a SIK polypeptide as defined above.

[0551] The invention also provides genetic constructs and vectors to facilitate introduction and/or expression of the SIK nucleic acid sequences useful in the methods according to the invention, in a plant.

[0552] Therefore, there is provided a gene construct comprising:
[0553] (i) a SIK nucleic acid as defined hereinabove or a SIK-encoding nucleic acid;
[0554] (ii) one or more control sequences operably linked to the SIK nucleic acid of (i).

[0555] A preferred construct in the case of reduction or substantial elimination of a SIK nucleic acid to give increased thousand kernel weight, increased harvest index and increased fill rate is one comprising an inverted repeat of a SIK nucleic acid, preferably capable of forming a hairpin structure, which inverted repeat is under the control of a constitutive promoter.

[0556] Constructs useful in the methods according to the present invention may be constructed using recombinant DNA technology well known to persons skilled in the art. The gene constructs may be inserted into vectors, which may be commercially available, suitable for transforming into plants and suitable for transcribing of the gene of interest in the transformed cells. The invention therefore provides use of a gene construct as defined hereinabove in the methods of the invention.

[0557] Plants are transformed with a vector comprising the sequence of interest. The skilled artisan is well aware of the genetic elements that must be present on the vector in order to successfully transform, select and propagate host cells containing the sequence of interest. The sequence of interest is operably linked to one or more control sequences (at least to a promoter). The terms “regulatory element”, “control sequence” and “promoter” are all used interchangeably herein and are defined above.

[0558] Advantageously, any type of promoter may be used in the methods o the present invention. The term “promoter” refers to a nucleic acid control sequence located upstream from the transcriptional start of a gene and which is involved in recognising and binding of RNA polymerase and other proteins, thereby directing transcription of an operably linked nucleic acid. The promoter may be a constitutive promoter. Alternatively, the promoter may be an inducible promoter. Additionally or alternatively, the promoter may be a tissue-specific promoter. Promoters able to initiate transcription in certain tissues only are referred to herein as “tissue-specific”, similarly, promoters able to initiate transcription in certain cells only are referred to herein as “cell-specific”.

[0559] Preferably, the nucleic acid sequence is operably linked to a constitutive promoter. Preferably the promoter is derived from a plant, more preferably the promoter is from a monocotyledonous plant if a monocotyledonous plant is to be transformed. Further preferably, the constitutive promoter is a GOS2 promoter that is represented by a nucleic acid sequence substantially similar to SEQ ID NO: 56 or 226. Most preferably the GOS2 promoter is as represented by SEQ ID NO: 56 or 226. It should be clear that the applicability of the present invention is not restricted to the SIK nucleic acid sequence as represented by SEQ ID NO: 209, nor is the applicability of the invention restricted to expression of a SIK nucleic acid sequence when driven by a GOS2 promoter. Examples of other constitutive promoters that may also be used to drive expression of a SIK nucleic acid sequence are shown above.

[0560] Optionally, one or more terminator sequences may be used in the construct introduced into a plant. Additional regulatory elements may include transcriptional as well as translational enhancers. Those skilled in the art will be aware of terminator and enhancer sequences that may be suitable for use in performing the invention. An intron sequence may also be added to the 5′ untranslated region (UTR) or in the coding sequence to increase the amount of the mature message that accumulates in the cytosol, as described in the definitions section. Other control sequences (besides promoter, enhancer, silencer, intron sequences, 3′UTR and/or 5′UTR regions) may be protein and/or RNA stabilizing elements. Such sequences would be known or may readily be obtained by a person skilled in the art.

[0561] The genetic constructs of the invention may further include an origin of replication sequence that is required for maintenance and/or replication in a specific cell type. One example is when a genetic construct is required to be maintained in a bacterial cell as an episomal genetic element (e.g. plasmid or cosmid molecule). Preferred origins of replication include, but are not limited to, the f1-ori and colE1.

[0562] For the detection of the successful transfer of the nucleic acid sequences as used in the methods of the invention and/or selection of transgenic plants comprising these nucleic acids, it is advantageous to use marker genes (or reporter genes). Therefore, the genetic construct may optionally comprise a selectable marker gene. Selectable markers are described in more detail in the “definitions” section herein. The marker genes may be removed or excised from the transgenic cell once they are no longer needed. Techniques for marker removal are known in the art, useful techniques are described above in the definitions section.

[0563] The expression of a SIK nucleic acid or SIK polypeptide may also be modulated by introducing a genetic modification, within the locus of a SIK gene. The locus of a gene as defined herein is taken to mean a genomic region, which includes the gene of interest and 10 kb up- or down stream of the coding region.

[0564] The genetic modification may be introduced, for example, by any one (or more) of the following methods: T-DNA tagging, TILLING and homologous recombination. Following introduction of the genetic modification, there follows a step of selecting for suitable modulated expression.

[0565] The methods of the invention are advantageously applicable to any plant. Plants that are particularly useful in the methods of the invention include all plants which belong to the superfamily Viridiplantae, in particular monocotyledonous and dicotyledonous plants including fodder or forage legumes, ornamental plants, food crops, trees or shrubs. According to a preferred embodiment of the present invention, the plant is a crop plant. Examples of crop plants include soybean, sunflower, canola, alfalfa, rapeseed, cotton, tomato, potato and tobacco. Further preferably, the plant is a monocotyledonous plant. Examples of monocotyledonous plants include sugarcane. More preferably the plant is a cereal. Examples of cereals include rice, maize, wheat, barley, millet, rye, triticale, sorghum and oats.

[0566] Other advantageous plants are selected from the group consisting of Asteraceae such as the genera Helianthus, Tagetes e.g. the species Helianthus annus [sunflower], Tagetes lucida, Tagetes erecta or Tagetes tenuifolia [Marigold], Brassicaceae such as the genera Brassica, Arabadopsis e.g. the species Brassica napus, Brassica rapa ssp. [canola, oilseed rape, turnip rape] or Arabidopsis thaliana. Fabaceae such as the genera Glycine e.g. the species Glycine max, Soja hispida or Soja max [soybean]. Linaceae such as the genera Linum e.g. the species Linum usitatissimum, [flax, linseed]; Poaceae such as the genera Hordeum, Secale, Avena, Sorghum, Oryza, Zea, Triticum e.g. the species Hordeum vulgare [barley]; Secale cereale [rye], Avena sativa, Avena fatua, Avena byzantina, Avena fatua var. sativa, Avena hybrida [oat], Sorghum bicolor [Sorghum, millet], Oryza sativa, Oryza latifolia [rice], Zea mays [corn, maize] Triticum aestivum, Triticum durum, Triticum turgidum, Triticum hybernum, Triticum macha, Triticum sativum or Triticum vulgare [wheat, bread wheat, common wheat]; Solanaceae such as the genera Solanum, Lycopersicon e.g. the species Solanum tuberosum [potato], Lycopersicon esculentum, Lycopersicon lycopersicum, Lycopersicon pyriforme, Solanum integrifolium or Solanum lycopersicum [tomato].

[0567] The present invention also encompasses plants obtainable by the methods according to the present invention. The present invention therefore provides plants, plant parts or plant cells thereof obtainable by the method according to the present invention, which plants or parts or cells thereof comprise a SIK nucleic acid transgene (which may encode a SIK polypeptide as defined above).

[0568] The invention furthermore provides a method for the production of transgenic plants having the various improved yield-related traits mentioned above, comprising introduction and expression in a plant SIK nucleic acid as defined.

[0569] Host plants for the nucleic acids or the vector used in the method according to the invention, the expression cassette or construct or vector are, in principle, advantageously all plants, which are capable of synthesizing the polypeptides used in the inventive method.

[0570] More specifically, the present invention provides a method for the production of transgenic plants having various improved yield-related traits relative to control plants, which method comprises:
[0571] (i) introducing and expressing a SIK nucleic acid in a plant cell; and
[0572] (ii) cultivating the plant cell under conditions promoting plant growth and development;
[0573] (iii) obtaining plants having increased number of flowers per plant.

[0574] Also provided is a method for the production of transgenic plants having various improved yield-related traits relative to control plants, which method comprises:
[0575] (i) introducing into a plant cell a construct for downregulating SIK gene expression; and
[0576] (ii) cultivating the plant cell under conditions promoting plant growth and development;
[0577] (iii) obtaining plants having one or more of increased thousand kernel weight, incraesd harvest index and increased fill rate.

[0578] The nucleic acid may be introduced directly into a plant cell or into the plant itself (including introduction into a tissue, organ or any other part of a plant). According to a preferred feature of the present invention, the nucleic acid is preferably introduced into a plant by transformation.

[0579] Further preferably the construct for downregulating SIK gene expression and introduced into the plant cell or plant comprise an inverted repeat of the SIK nucleic acid or a part thereof.

[0580] Generally after transformation, plant cells or cell groupings are selected for the presence of one or more markers which are encoded by plant-expressible genes co-transferred with the gene of interest, following which the transformed material is regenerated into a whole plant.

[0581] As mentioned Agrobacteria transformed with an expression vector according to the invention may also be used in the manner known per se for the transformation of plants such as experimental plants like Arabidopsis or crop plants, such as, for example, cereals, maize, oats, rye, barley, wheat, soya, rice, cotton, sugarbeet, canola, sunflower, flax, hemp, potato, tobacco, tomato, carrot, bell peppers, oilseed rape, tapioca, cassaya, arrow root, tagetes, alfalfa, lettuce and the various tree, nut, and grapevine species, in particular oil-containing crop plants such as soya, peanut, castor-oil plant, sunflower, maize, cotton, flax, oilseed rape, coconut, oil palm, safflower (Carthamus tinctorius) or cocoa beans, for example by bathing scarred leaves or leaf segments in an agrobacterial solution and subsequently growing them in suitable media.

[0582] The genetically modified plant cells can be regenerated via all methods with which the skilled worker is familiar. Suitable methods can be found in the abovementioned publications by S.D. Kung and R. Wu, Potrykus or Hofgen and Willmitzer.

[0583] To select transformed plants, the plant material obtained in the transformation is, as a rule, subjected to selective conditions so that transformed plants can be distinguished from untransformed plants. For example, the seeds obtained in the above-described manner can be planted and, after an initial growing period, subjected to a suitable selection by spraying. A further possibility consists in growing the seeds, if appropriate after sterilization, on agar plates using a suitable selection agent so that only the transformed seeds can grow into plants. Alternatively, the transformed plants are screened for the presence of a selectable marker such as the ones described above.

[0584] Following DNA transfer and regeneration, putatively transformed plants may be evaluated, for instance using Southern analysis, for the presence of the gene of interest, copy number and/or genomic organisation. Alternatively or additionally, expression levels may be monitored using Northern and/or Western analysis, or quantitative PCR, all techniques being well known to persons having ordinary skill in the art.

[0585] The generated transformed plants may be propagated by a variety of means, such as by clonal propagation or classical breeding techniques. For example, a first generation (or T1) transformed plant may be selfed to give homozygous second generation (or T2) transformants, and the T2 plants further propagated through classical breeding techniques.

[0586] The generated transformed organisms may take a variety of forms. For example, they may be chimeras of transformed cells and non-transformed cells; clonal transformants (e.g., all cells transformed to contain the expression cassette); grafts of transformed and untransformed tissues (e.g., in plants, a transformed rootstock grafted to an untransformed scion).

[0587] The present invention clearly extends to any plant cell or plant produced by any of the methods described herein, and to all plant parts and propagules thereof. The present invention extends further to encompass the progeny of a primary transformed or transfected cell, tissue, organ or whole plant that has been produced by any of the aforementioned methods, the only requirement being that progeny exhibit the same genotypic and/or phenotypic characteristic(s) as those produced by the parent in the methods according to the invention.

[0588] The invention also includes host cells containing an isolated SIK nucleic acid as defined hereinabove. Preferred host cells according to the invention are plant cells. Host plants for the nucleic acids or the vector used in the method according to the invention, the expression cassette or construct or vector are, in principle, advantageously all plants, which are capable of synthesizing the polypeptides used in the inventive method.

[0589] The invention also extends to harvestable parts of a plant such as, but not limited to seeds, leaves, fruits, flowers, stems, rhizomes, tubers and bulbs. The invention furthermore relates to products derived, preferably directly derived, from a harvestable part of such a plant, such as dry pellets or powders, oil, fat and fatty acids, starch or proteins.

[0590] The present invention also encompasses use of SIK nucleic acids and SIK polypeptides in improving various yield-related traits as mentioned above.

[0591] Nucleic acids encoding SIK polypeptides may find use in breeding programmes in which a DNA marker is identified which may be genetically linked to a SIK gene. The nucleic acids/genes may be used to define a molecular marker. This DNA marker may then be used in breeding programmes to select plants having increased yield as defined hereinabove in the methods of the invention.

[0592] Allelic variants of a SIK nucleic acid/gene may also find use in marker-assisted breeding programmes. Such breeding programmes sometimes require introduction of allelic variation by mutagenic treatment of the plants, using for example EMS mutagenesis; alternatively, the programme may start with a collection of allelic variants of so called “natural” origin caused unintentionally. Identification of allelic variants then takes place, for example, by PCR. This is followed by a step for selection of superior allelic variants of the sequence in question and which give increased yield. Selection is typically carried out by monitoring growth performance of plants containing different allelic variants of the sequence in question. Growth performance may be monitored in a greenhouse or in the field. Further optional steps include crossing plants in which the superior allelic variant was identified with another plant. This could be used, for example, to make a combination of interesting phenotypic features.

[0593] A SIK nucleic acid may also be used as probes for genetically and physically mapping the genes that they are a part of, and as markers for traits linked to those genes. Such information may be useful in plant breeding in order to develop lines with desired phenotypes. Such use of SIK nucleic acids requires only a nucleic acid sequence of at least 15 nucleotides in length. The SIK nucleic acids may be used as restriction fragment length polymorphism (RFLP) markers. Southern blots (Sambrook J, Fritsch E F and Maniatis T (1989) Molecular Cloning, A Laboratory Manual) of restriction-digested plant genomic DNA may be probed with the SIK nucleic acids. The resulting banding patterns may then be subjected to genetic analyses using computer programs such as MapMaker (Lander et al. (1987) Genomics 1: 174-181) in order to construct a genetic map. In addition, the nucleic acids may be used to probe Southern blots containing restriction endonuclease-treated genomic DNAs of a set of individuals representing parent and progeny of a defined genetic cross. Segregation of the DNA polymorphisms is noted and used to calculate the position of the SIK nucleic acid in the genetic map previously obtained using this population (Botstein et al. (1980) Am. J. Hum. Genet. 32:314-331).

[0594] The production and use of plant gene-derived probes for use in genetic mapping is described in Bernatzky and Tanksley (Plant Mol. Biol. Reporter 4: 37-41, 1986). Numerous publications describe genetic mapping of specific cDNA clones using the methodology outlined above or variations thereof. For example, F2 intercross populations, backcross populations, randomly mated populations, near isogenic lines, and other sets of individuals may be used for mapping. Such methodologies are well known to those skilled in the art.

[0595] The nucleic acid probes may also be used for physical mapping (i.e., placement of sequences on physical maps; see Hoheisel et al. In: Non-mammalian Genomic Analysis: A Practical Guide, Academic press 1996, pp. 319-346, and references cited therein).

[0596] In another embodiment, the nucleic acid probes may be used in direct fluorescence in situ hybridisation (FISH) mapping (Trask (1991) Trends Genet. 7:149-154). Although current methods of FISH mapping favour use of large clones (several kb to several hundred kb; see Laan et al. (1995) Genome Res. 5:13-20), improvements in sensitivity may allow performance of FISH mapping using shorter probes.

[0597] A variety of nucleic acid amplification-based methods for genetic and physical mapping may be carried out using the nucleic acids. Examples include allele-specific amplification (Kazazian (1989) J. Lab. Clin. Med 11:95-96), polymorphism of PCR-amplified fragments (CAPS; Sheffield et al. (1993) Genomics 16:325-332), allele-specific ligation (Landegren et al. (1988) Science 241:1077-1080), nucleotide extension reactions (Sokolov (1990) Nucleic Acid Res. 18:3671), Radiation Hybrid Mapping (Walter et al. (1997) Nat. Genet. 7:22-28) and Happy Mapping (Dear and Cook (1989) Nucleic Acid Res. 17:6795-6807). For these methods, the sequence of a nucleic acid is used to design and produce primer pairs for use in the amplification reaction or in primer extension reactions. The design of such primers is well known to those skilled in the art. In methods employing PCR-based genetic mapping, it may be necessary to identify DNA sequence differences between the parents of the mapping cross in the region corresponding to the instant nucleic acid sequence. This, however, is generally not necessary for mapping methods.

[0598] The methods according to the present invention result in plants having altered yield-related traits, as described hereinbefore. These traits may also be combined with other economically advantageous traits, such as further yield-enhancing traits, tolerance to other abiotic and biotic stresses, traits modifying various architectural features and/or biochemical and/or physiological features.

### Detailed Description for the Class II HD-Zip Transcription Factors

[0599] It has now been found that nucleic acids encoding Class II HD-Zip transcription factors are useful in modifying the content of storage compounds in seeds. The present invention therefore provides a method for modifying the content of storage compounds in seeds relative to control plants by modulating expression in a plant of a nucleic acid encoding a Class II HD-Zip transcription factor. The present invention also provides nucleic acid sequences and constructs useful in performing such methods. The invention further provides seeds having a modified content of storage compounds relative to control plants, which seeds have modulated expression of a nucleic acid encoding a Class II HD-Zip transcription factor.

[0600] The present invention provides a method for modifying the content of storage compounds in seeds relative to control plants, comprising modulating expression in a plant of a nucleic acid encoding a Class II HD-Zip transcription factor.

[0601] A preferred method for modulating (preferably, increasing) expression of a nucleic acid encoding a Class II HD-Zip transcription factor is by introducing and expressing in a plant a nucleic acid encoding a Class II HD-Zip transcription factor as will now be defined.

[0602] A “Class II HD-Zip transcription factor” is taken to mean a polypeptide comprising the following: (i) a homeodomain box; (ii) a leucine zipper; and (iii) Motifs I, II and III given below (in any order).

### Motif I (SEQ ID NO: 279)

[0603] RKKLRL, or Motif I with one or more conservative amino acid substitution at any position, and/or Motif I with one or two non-conservative change(s) at any position; and

[0604] Motif II (SEQ ID NO: 280)

[0605] TKLKQTEVDCEFLRRCCENLTEEN, or Motif II with one or more conservative amino acid substitution at any position, and/or a motif having in increasing order of preference at least 50%, 55%, 60%, 65%, 70%, 75%, 80%, 85%, 90%, 95% or more sequence identity to Motif II; and

### Motif III (SEQ ID NO: 281)

[0606] TLTMCPSCER, or Motif III with one or more conservative amino acid substitution at any position, and/or Motif III with one, two or three non-conservative change(s) at any position.

[0607] Any reference herein to a “nucleic acid encoding a Class II HD-Zip transcription factor” or to a Class II HD-Zip-encoding nucleic acid” is taken to mean a nucleic acid encoding a Class II HD-Zip transcription factor as defined hereinabove, such nucleic acids being useful in performing the methods of the invention.

[0608] As mentioned, a preferred method for modulating (preferably, increasing) expression of a nucleic acid encoding a Class II HD-Zip transcription factor is by introducing and expressing in a plant a nucleic acid encoding a Class II HD-Zip transcription factor.

[0609] The present invention is illustrated by transforming plants with the nucleic acid sequence represented by SEQ ID NO: 229, encoding the polypeptide sequence of SEQ ID NO: 230.

[0610] However, performance of the invention is not restricted to these sequences; the methods of the invention may advantageously be performed using any Class II HD-Zip transcription factor-encoding nucleic acid or Class II HD-Zip transcription factor as defined herein.

[0611] For example, nucleic acids encoding orthologues or paralogues of an amino acid sequence represented by SEQ ID NO: 230 may be useful in performing the methods of the invention. Examples of such orthologues and paralogues are provided in Table A of Example 1.

[0612] Orthologues and paralogues encompass evolutionary concepts used to describe the ancestral relationships of genes. Paralogues are genes within the same species that have originated through duplication of an ancestral gene and orthologues are genes from different organisms that have originated through speciation.

[0613] Orthologues and paralogues may easily be found by performing a so-called reciprocal blast search. Typically this involves a first BLAST involving BLASTing a query sequence (for example, SEQ ID NO: 229 or SEQ ID NO: 230) against any sequence database, such as the publicly available NCB! database which may be found at: http://www.ncbi.nlm.nih.gov. BLASTN or TBLASTX (using standard default values) are generally used when starting from a nucleotide sequence, and BLASTP or TBLASTN (using standard default values) when starting from a protein sequence. The BLAST results may optionally be filtered. The full-length sequences of either the filtered results or non-filtered results are then BLASTed back (second BLAST) against sequences from the organism from which the query sequence is derived (where the query sequence is SEQ ID NO: 229 or SEQ ID NO: 230, the second BLAST would therefore be against Oryza sequences). The results of the first and second BLASTs are then compared. A paralogue is identified if a high-ranking hit from the first blast is from the same species as from which the query sequence is derived, a BLAST back then ideally results in the query sequence being among the highest hits; an orthologue is identified if a high-ranking hit in the first BLAST is not from the same species as from which the query sequence is derived, and preferably results upon BLAST back in the query sequence being among the highest hits. High-ranking hits are those having a low E-value. The lower the E-value, the more significant the score (or in other words the lower the chance that the hit was found by chance). Computation of the E-value is well known in the art. In addition to E-values, comparisons are also scored by percentage identity. Percentage identity refers to the number of identical nucleotides (or amino acids) between the two compared nucleic acid (or polypeptide) sequences over a particular length. In the case of large families, ClustalW may be used, followed by a neighbour joining tree, to help visualize clustering of related genes and to identify orthologues and paralogues.

[0614] Nucleic acids encoding homologues of an amino acid sequence represented by SEQ ID NO: 230, or nucleic acids encoding homologues of any of the amino acid sequences given in Table H, may also be useful in performing the methods of the invention.

[0615] Also useful in the methods of the invention are nucleic acids encoding derivatives of any one of the amino acids given in Table H or derivatives of orthologues or paralogues of any of the amino acid sequences given in Table H. “Derivatives” include peptides, oligopeptides, polypeptides which may, compared to the amino acid sequence of the naturally-occurring form of the protein, such as the one presented in SEQ ID NO: 230, comprise substitutions of amino acids with non-naturally occurring amino acid residues, or additions of non-naturally occurring amino acid residues.

[0616] Homologues (or homologous proteins, encompassing orthologues and paralogues) may readily be identified using routine techniques well known in the art, such as by sequence alignment. Methods for the alignment of sequences for comparison are well known in the art, such methods include GAP, BESTFIT, BLAST, FASTA and TFASTA. GAP uses the algorithm of Needleman and Wunsch ((1970) J Mol Biol 48: 443-453) to find the alignment of two complete sequences that maximizes the number of matches and minimizes the number of gaps. The BLAST algorithm (Altschul et al. (1990) J Mol Biol 215: 403-410) calculates percent sequence identity and performs a statistical analysis of the similarity between the two sequences. The software for performing BLAST analysis is publicly available through the National Centre for Biotechnology Information. Homologues may readily be identified using, for example, the ClustalW multiple sequence alignment algorithm (version 1.83), with the default pairwise alignment parameters, and a scoring method in percentage. Global percentages of similarity and identity may also be determined using one of the methods available in the MatGAT software package (Campanella et al., BMC Bioinformatics. 4, 29, 2003). Minor manual editing may be performed to optimise alignment between conserved motifs, as would be apparent to a person skilled in the art. Furthermore, instead of using full-length sequences for the identification of homologues, specific domains may be used as well.

[0617] The sequence identity values, which are indicated below as a percentage were determined over the entire nucleic acid or amino acid sequence using ClustalW and default parameters.

[0618] Preferably, the polypeptides encoded by the nucleic acids useful in the methods of the present invention (such as any of the polypeptide sequences given in Table H) have, in increasing order of preference, at least 40%, 41%, 42%, 43%, 44%, 45%, 46%, 47%, 48%, 49%, 50%, 51%, 52%, 53%, 54%, 55%, 56%, 57%, 58%, 59%, 60%, 61%, 62%, 63%, 64%, 65%, 66%, 67%, 68%, 69%, 70%, 71%, 72%, 73%, 74%, 75%, 76%, 77%, 78%, 79%, 80%, 81%, 82%, 83%, 84%, 85%, 86%, 87%, 88%, 89%, 90%, 91%, 92%, 93%, 94%, 95%, 96%, 97%, 98%, 99% identity to the polypeptide of SEQ ID NO: 230.

[0619] According to the present invention, there is provided a method for modifying the content of storage compounds in seeds relative to control plants, comprising modulating expression in a plant of a nucleic acid encoding a Class II HD-Zip transcription factor represented by SEQ ID NO: 2 or an orthologue, paralogue or homologue thereof.

[0620] A preferred method for modulating (preferably, increasing) expression of a nucleic acid encoding a Class II HD-Zip transcription factor is by introducing and expressing in a plant a nucleic acid encoding a Class II HD-Zip transcription factor represented by SEQ ID NO: 230 or an orthologue, paralogue or homologue thereof.

[0621] The orthologues, paralogues and homologues described above fall under the definition of a Class II HD-Zip transcription factor, i.e. meaning that the orthologues, paralogues and homologues are polypeptides comprising the following: (i) a homeodomain box; (ii) a leucine zipper; and (iii) Motifs I, II and III described herein.

[0622] The various domains and motifs may be used to help identify sequences useful in the methods of the invention. Specialist databases also exist for the identification of domains, for example, SMART (Schultz et al. (1998) Proc. Natl. Acad. Sci. USA 95, 5857-5864; Letunic et al. (2002) Nucleic Acids Res 30, 242-244, InterPro (Mulder et al., (2003) Nucl. Acids. Res. 31, 315-318, Prosite (Bucher and Bairoch (1994), A generalized profile syntax for biomolecular sequences motifs and its function in automatic sequence interpretation. (In) ISMB-94; Proceedings 2nd International Conference on Intelligent Systems for Molecular Biology. Altman R., Brutlag D., Karp P., Lathrop R., Searls D., Eds., pp 53-61, AAAIPress, Menlo Park; Hulo et al., Nucl. Acids. Res. 32:D134-D137, (2004), or Pfam (Bateman et al., Nucleic Acids Research 30(1): 276-280 (2002). Domains and motifs may also be identified using routine techniques, such as by sequence alignment as described herein.

[0623] Nucleic acids useful in the methods of the invention need not be full-length, since performance of the methods of the invention does not rely on the use of full length nucleic acids. Examples include portions of the nucleic acid sequence represented by SEQ ID NO: 229 or portions of any one of the nucleic acid sequences given in Table H.

[0624] According to the present invention, there is provided a method for modifying the content of storage compounds in seeds relative to control plants, comprising modulating expression in a plant of a portion of a nucleic acid sequence represented by SEQ ID NO: 229, or comprising modulating expression in a plant of a portion of any one of the nucleic acid sequences given in Table H, or comprising modulating expression in a plant of a portion of a nucleic acid sequence encoding an orthologue, paralogue or homologue of any of the amino acid sequences given in Table H.

[0625] A preferred method for modulating (preferably, increasing) expression in a plant of such a portion is by introducing and expressing in a plant a portion of a nucleic acid sequence given in Table H, or comprising introducing and expressing in a plant a portion of a nucleic acid sequence encoding an orthologue, paralogue or homologue of any of the polypeptide sequences given in Table H.

[0626] Portions useful in the methods of the invention, include portions of sufficient length to encode a polypeptide falling under the definition of a Class II HD-Zip transcription factor, i.e. meaning that the polypeptide comprises the following: (i) a homeodomain box; (ii) a leucine zipper; and (iii) Motifs I, II and III described herein. Furthermore, such portions have substantially the same biological activity as Class II HD-Zip transcription factors.

[0627] Preferably, the portion is at least 500 consecutive nucleotides in length, preferably at least 750 consecutive nucleotides in length, more preferably at least 1,250 consecutive nucleotides in length, the consecutive nucleotides being of SEQ ID NO: 229, or of any one of the nucleic acid sequences given in Table H, or of any nucleic acid encoding an orthologue, paralogue or homologue of any one of the amino acid sequences given in Table H. Most preferably the portion is a portion of the nucleic acid of SEQ ID NO: 229.

[0628] A portion as defined herein may be prepared, for example, by making one or more deletions to the nucleic acid in question. The portions may be used in isolated form or they may be fused to other coding (or non coding) sequences in order to, for example, produce a protein that combines several activities. When fused to other coding sequences, the resultant polypeptide produced upon translation may be bigger than that predicted for the portion.

[0629] Another nucleic acid useful in the methods of the invention is a nucleic acid capable of hybridising, under reduced stringency conditions, preferably under medium stringency conditions, more preferably under stringent conditions, with a nucleic acid represented by SEQ ID NO: 229, or capable of hybridising, under reduced stringency conditions, preferably under medium stringency conditions, more preferably under stringent conditions, with a nucleic acid sequence given in Table H, or capable of hybridising under reduced stringency conditions, preferably under medium stringency conditions, more preferably under stringent conditions with a nucleic acid encoding an orthologue, paralogue or homologue of a polypeptide sequence given in Table H.

[0630] According to the present invention, there is provided a method for modifying the content of storage compounds in seeds relative to control plants, comprising modulating expression in a plant of a nucleic acid capable of hybridising to a nucleic acid represented by SEQ ID NO: 229, or comprising modulating expression in a plant of a nucleic acid capable of hybridising to a nucleic acid sequence given in Table H, or comprising modulating expression in a plant of a nucleic acid capable of hybridising to a nucleic acid sequence encoding an orthologue, paralogue or homologue of any of the polypeptide sequences given in Table H. Most preferably the hybridising sequence is capable of hybridising to a nucleic acid as represented by SEQ ID NO: 229. The hybridising sequence is preferably capable of hybridising under reduced stringency conditions, preferably under medium stringency conditions, more preferably under stringent conditions.

[0631] A preferred method for modulating (preferably, increasing) expression in a plant of such a hybridising sequence is by introducing and expressing in a plant a nucleic acid capable of hybridising to a nucleic acid sequence given in Table H, or comprising introducing and expressing in a plant of a nucleic acid sequence capable of hybridising to a nucleic acid sequence encoding an orthologue, paralogue or homologue of any one of the amino acid sequences given in Table H. Most preferably the hybridising sequence is capable of hybridising to a nucleic acid as represented by SEQ ID NO: 229. The hybridising sequence is preferably capable of hybridising under reduced stringency conditions, preferably under medium stringency conditions, more preferably under stringent conditions.

[0632] Hybridising sequences useful in the methods of the invention, include nucleic acids of sufficient length to encode a polypeptide falling under the definition of a Class II HD-Zip transcription factor, i.e. meaning that the polypeptide comprises the following: (i) a homeodomain box; (ii) a leucine zipper; and (iii) Motifs I, II and III described herein. Furthermore, such hybridising sequences have substantially the same biological activity as the Class II HD-Zip transcription factors.

[0633] The hybridising sequence is typically at least 500 consecutive nucleotides in length, preferably at least 750 consecutive nucleotides in length, more preferably at least 1,250 consecutive nucleotides in length, the consecutive nucleotides being of any nucleic acid capable of hybridising to a nucleic acid sequence given in Table H, or of any nucleic acid encoding an orthologue, paralogue or homologue of any one of the amino acid sequences given in Table H. Most preferably the consecutive nucleotides are of a nucleic acid capable of hybridising to a nucleic acid represented by SEQ ID NO: 229 or to a portion thereof.

[0634] Another nucleic acid useful in the methods of the invention is a splice variant of SEQ ID NO: 229, or a splice variant of any of the nucleic acid sequences given in Table H, or a splice variant of a nucleic acid encoding an orthologue, paralogue or homologue of any one of the amino acid sequences given in Table H.

[0635] According to the present invention, there is provided a method for modifying the content of storage compounds in seeds relative to control plants, comprising modulating expression in a plant of a splice variant of a nucleic acid represented by SEQ ID NO: 229, or comprising modulating expression in a plant of a splice variant of nucleic acid sequence given in Table H, or comprising modulating expression in a plant of a splice variant of a nucleic acid sequence encoding an orthologue, paralogue or homologue of any one of the amino acid sequences given in Table H.

[0636] A preferred method for modulating (preferably, increasing) expression in a plant of such a splice variant is by introducing and expressing in a plant a splice variant of a nucleic acid sequence given in Table H, or comprising introducing and expressing in a plant a splice variant of a nucleic acid sequence encoding an orthologue, paralogue or homologue of any one of the amino acid sequences given in Table H.

[0637] Splice variants useful in the methods of the invention, include nucleic acids of sufficient length to encode a polypeptide falling under the definition of a Class II HD-Zip transcription factor, i.e. meaning that the polypeptide comprises the following: (i) a homeodomain box; (ii) a leucine zipper; and (iii) Motifs I, II and III described herein. Furthermore, such splice variants have substantially the same biological activity as the Class II HD-Zip transcription factors.

[0638] Another nucleic acid useful in performing the methods of the invention is an allelic variant of SEQ ID NO: 229, or an allelic variant of any of the nucleic acid sequences given in Table H, or an allelic variant of a nucleic acid encoding an orthologue, paralogue or homologue of any one of the amino acid sequences given in Table H. Allelic variants exist in nature, and encompassed within the methods of the present invention is the use of these natural alleles.

[0639] According to the present invention, there is provided a method for modifying the content of storage compounds in seeds relative to control plants, comprising modulating expression in a plant of an allelic variant of a nucleic acid represented by SEQ ID NO: 229, or comprising modulating expression in a plant of an allelic variant of nucleic acid sequence given in Table H, or comprising modulating expression in a plant of an allelic variant of a nucleic acid sequence encoding an orthologue, paralogue or homologue of any one of the amino acid sequences given in Table H.

[0640] A preferred method for modulating (preferably, increasing) expression in a plant of such an allelic variant is by introducing and expressing in a plant an allelic variant of a nucleic acid sequence given in Table H, or comprising introducing and expressing in a plant an allelic variant of a nucleic acid sequence encoding an orthologue, paralogue or homologue of any one of the amino acid sequences given in Table H.

[0641] Allelic variants useful in the methods of the invention, include nucleic acids of sufficient length to encode a polypeptide falling under the definition of a Class II HD-Zip transcription factor, i.e. meaning that the polypeptide comprises the following: (i) a homeodomain box; (ii) a leucine zipper; and (iii) Motifs I, II and III described herein. Furthermore, such allelic variants have substantially the same biological activity as the Class II HD-Zip transcription factors.

[0642] A further nucleic acid useful in the methods of the invention is a nucleic acid obtained by gene shuffling. Gene shuffling or directed evolution may also be used to generate variants of any one of the nucleic acids given in Table H, or variants of nucleic acids encoding orthologues, paralogues or homologues of any one of the amino acid sequences given in Table H.

[0643] According to the present invention, there is provided a method for modifying the content of storage compounds in seeds relative to control plants, comprising modulating expression in a plant of a variant of a nucleic acid represented by SEQ ID NO: 229, or comprising modulating expression in a plant of a variant of any one of the nucleic acid sequences given in Table H, or comprising modulating expression in a plant a variant of a nucleic acid encoding an orthologue, paralogue or homologue of any of the amino acid sequences given in Table H, which variant nucleic acid is obtained by gene shuffling.

[0644] A preferred method for modulating (preferably, increasing) expression in a plant of such a variant obtained by gene shuffling is by introducing and expressing in a plant a variant of any one of the nucleic acid sequences given in Table H, or comprising introducing and expressing in a plant a variant of a nucleic acid sequence encoding an orthologue, paralogue or homologue of any of the amino acid sequences given in Table H, which variant nucleic acid is obtained by gene shuffling.

[0645] Such variants obtained by gene shuffling useful in the methods of the invention, include nucleic acids of sufficient length to encode a polypeptide falling under the definition of a Class II HD-Zip transcription factor, i.e. meaning that the polypeptide comprising the following: (i) a homeodomain box; (ii) a leucine zipper; and (iii) Motifs I, II and III described herein.

[0646] Furthermore, nucleic acids useful in the methods of the invention may also be obtained by site-directed mutagenesis. Several methods are available to achieve site-directed mutagenesis, the most common being PCR-based methods (Current Protocols in Molecular Biology. Wiley Eds.).

[0647] Class II HD-Zip transcription factors exhibit the general biological activity of transcription factors (at least in their native form) and typically have DNA-binding activity and an activation domain. A person skilled in the art may easily determine the presence of an activation domain and DNA-binding activity using routine tools and techniques. Sessa et al., 1997 (J Mol Biol 274(3):303-309) studied the DNA-binding properties of the ATHB-1 and ATHB-2 (=HAT4) HD-Zip (HD-Zip-1 and -2) domains and found that they interact with DNA as homodimers and recognize two distinct 9 by pseudopalindromic sequences, CAAT(A/T)ATTG (BS-1) and CAAT(G/C)ATTG (BS-2), respectively. From a mutational analysis of the HD-Zip-2 domain, they determined that conserved amino acid residues of helix 3, Va147 and Asn51, and Arg55 are essential for the DNA-binding activity of the HD-Zip-2 domain. They also report that the preferential recognition of a G/C base-pair at the central position by the HD-Zip-2 domain is abolished either by the replacement of Arg55 with lysine or by the substitution of Glu46 and Thr56 with the corresponding residues of the HD-Zip-1 domain (alanine and tryptophan, respectively).

[0648] According to a preferred feature of the invention, the modulated expression is increased expression. Methods for increasing expression of nucleic acids or genes, or gene products, are well documented in the art.

[0649] Another method for modulating expression in a plant of a nucleic acid encoding a Class II HD-Zip transcription factor comprises the reduction or substantial elimination of expression in a plant of an endogenous gene encoding a Class II HD-Zip transcription factor. Reference herein to “reduction or substantial elimination” is taken to mean a decrease in endogenous gene expression and/or polypeptide levels and/or polypeptide activity relative to control plants.

[0650] The reduction or substantial elimination is in increasing order of preference at least 10%, 20%, 30%, 40% or 50%, 60%, 70%, 80%, 85%, 90%, or 95%, 96%, 97%, 98%, 99% or more reduced compared to that of control plants. Methods for decreasing expression are described above in the “definitions” sections.

[0651] For the reduction or substantial elimination of expression an endogenous gene in a plant, a sufficient length of substantially contiguous nucleotides of a nucleic acid sequence is required. In order to perform gene silencing, this may be as little as 20, 19, 18, 17, 16, 15, 14, 13, 12, 11, 10 or fewer nucleotides, alternatively this may be as much as the entire gene (including the 5′ and/or 3′ UTR, either in part or in whole). The stretch of substantially contiguous nucleotides may be derived from SEQ ID NO: 229, or from any of the nucleic acid sequences given in Table H, or from any nucleic acid capable of encoding an orthologue, paralogue or homologue of any one of the amino acid sequences given in Table H. A nucleic acid sequence encoding a (functional) polypeptide is not a requirement for the various methods discussed herein for the reduction or substantial elimination of expression of an endogenous gene.

[0652] Nucleic acids suitable for use in the methods of the invention may be derived from any natural or artificial source. The nucleic acid may be modified from its native form in composition and/or genomic environment through deliberate human manipulation. Preferably the nucleic acid is from a plant, further preferably from a dicotyledonous plant, further preferably from the family Brassicaceae, more preferably from Arabidopsis thaliana.

[0653] A preferred method for modulating (preferably, increasing) expression of a nucleic acid encoding a Class II HD-Zip transcription factor is by introducing and expressing in a plant a nucleic acid encoding a Class II HD-Zip transcription factor; however the effects of performing the method, i.e. the modified content of seed storage compounds, may also be achieved using other well known techniques. One such technique is T-DNA activation tagging. The effects of the invention may also be reproduced using the technique of TILLING. The effects of the invention may also be reproduced using homologous recombination, which allows introduction in a genome of a selected nucleic acid at a defined selected position.

[0654] Performance of the methods of the invention gives plants having seeds with a modified content of seed storage compounds relative to the seeds of control plants. The modified content of seed storage compounds refers to a modified content of one or more of lipids, oil, fatty acids, starch, sugar and proteins relative to that of control plants. Preferably, modulation of expression in a plant of a nucleic acid encoding a Class II HD-Zip transcription factor gives plants with seeds having increased oil content relative to the seeds of control plants. In such a case, the modulated expression is typically overexpression in a plant of a nucleic acid encoding a Class II HD-Zip transcription factor. Preferably, modulation of expression in a plant of a nucleic acid encoding a Class II HD-Zip transcription factor gives plants with seeds having increased protein content relative to the seeds of control plants. In such a case, the modulated expression is typically the reduction or substantial elimination of expression of an endogenous Class II HD-Zip transcription factor-encoding gene.

[0655] The present invention also encompasses plants or parts thereof (particularly seeds) obtainable by the methods according to the present invention. The plants or parts thereof comprise a nucleic acid transgene (comprising any one of the nucleic acid sequences described above as being useful in the methods of the invention).

[0656] The invention also provides genetic constructs and vectors to facilitate introduction and/or expression in a plant of the nucleic acid sequences described above as being useful in the methods of the invention.

[0657] More particularly, there is provided a gene construct comprising:
[0658] (i) A nucleic acid encoding a Class II HD-Zip transcription factor as defined hereinabove;
[0659] (ii) One or more control sequences operably linked to the nucleic acid of (i).

[0660] Constructs useful in the methods according to the present invention may be constructed using recombinant DNA technology well known to persons skilled in the art. The gene constructs may be inserted into vectors, which may be commercially available, suitable for transforming into plants and suitable for expression of the gene of interest in the transformed cells. The invention therefore provides use of a gene construct as defined hereinabove in the methods of the invention.

[0661] Plants are transformed with a vector comprising the sequence of interest. The skilled artisan is well aware of the genetic elements that must be present in the vector in order to successfully transform, select and propagate host cells containing the sequence of interest. The sequence of interest is operably linked to one or more control sequences (at least to a promoter). The terms “regulatory element”, “control sequence” and “promoter” are all used interchangeably herein and are defined above.

[0662] Advantageously, any type of promoter, whether natural or synthetic, may be used to drive expression of the nucleic acid sequence. See the “Definitions” section herein for definitions of various promoter types.

[0663] According to a preferred feature of the invention, the nucleic acid of interest is operably linked to a constitutive promoter. A constitutive promoter is transcriptionally active during most but not necessarily all phases of growth and development and is substantially ubiquitously expressed. The constitutive promoter is preferably a GOS2 promoter, more preferably the constitutive promoter is a rice GOS2 promoter, further preferably the constitutive promoter is represented by a nucleic acid sequence substantially similar to SEQ ID NO: 56 or SEQ ID NO: 282, most preferably the constitutive promoter is as represented by SEQ ID NO: 56 or SEQ ID NO: 282. Examples of other constitutive promoters which may also be used to perform the methods of the invention are shown above.

[0664] Optionally, one or more terminator sequences may be used in the construct introduced into a plant. Additional regulatory elements may include transcriptional as well as translational enhancers. Those skilled in the art will be aware of terminator and enhancer sequences that may be suitable for use in performing the invention. An intron sequence may also be added to the 5′ untranslated region (UTR) or in the coding sequence to increase the amount of the mature message that accumulates in the cytosol, as described in the definitions section. Other control sequences (besides promoter, enhancer, silencer, intron sequences, 3′UTR and/or 5′UTR regions) may be protein and/or RNA stabilizing elements. Such sequences would be known or may readily be obtained by a person skilled in the art.

[0665] The genetic constructs of the invention may further include an origin of replication sequence that is required for maintenance and/or replication in a specific cell type. One example is when a genetic construct is required to be maintained in a bacterial cell as an episomal genetic element (e.g. plasmid or cosmid molecule). Preferred origins of replication include, but are not limited to, the f1-oh and colE1.

[0666] For the detection of the successful transfer of the nucleic acid sequences as used in the methods of the invention and/or selection of transgenic plants comprising these nucleic acids, it is advantageous to use marker genes (or reporter genes). Therefore, the genetic construct may optionally comprise a selectable marker gene. Selectable markers are described in more detail in the “definitions” section herein. The marker genes may be removed or excised from the transgenic cell once they are no longer needed. Techniques for marker removal are known in the art, useful techniques are described above in the definitions section.

[0667] The invention also provides a method for the production of transgenic plants having modified content of storage compounds in seeds relative to control plants, comprising introduction and expression in a plant of a nucleic acid sequence represented by SEQ ID NO: 229, or comprising introduction and expression in a plant of a nucleic acid sequence given in Table H, or comprising introduction and expression in a plant of a nucleic acid sequence encoding an orthologue, paralogue or homologue of any of the amino acid sequences given in Table H, or comprising introduction and expression in a plant of any of the nucleic acids defined herein as being useful in the methods of the invention.

[0668] More specifically, the present invention provides a method for the production of transgenic plants having modified content of storage compounds in seeds relative to control plants, which method comprises:
[0669] (i) introducing and expressing in a plant, plant part or plant cell a nucleic acid sequence represented by SEQ ID NO: 229, or comprising introducing and expressing in a plant a nucleic acid sequence given in Table H, or comprising introducing and expressing in a plant a nucleic acid sequence encoding an orthologue, paralogue or homologue of any of the amino acid sequences given in Table H; and
[0670] (ii) cultivating the plant cell under conditions promoting plant growth and development; and
[0671] (iii) harvest of seeds from the plant of (ii); and optionally
[0672] (iv) extraction of any one or more of lipids, oils, fatty acids, starch, sugar or protein from the seeds of (iii).

[0673] The harvested seeds may be processed to extract particular seed storage compounds, such as lipids, oils fatty acids, starch, sugar or protein. In particular, the seeds are used for oil extraction. The oils may be extracted from processed or unprocessed seeds.

[0674] The nucleic acid may be introduced directly into a plant cell or into the plant itself (including introduction into a tissue, organ or any other part of a plant). According to a preferred feature of the present invention, the nucleic acid is preferably introduced into a plant by transformation.

[0675] The term “transformation” as referred to herein is as defined above. Plant tissue capable of subsequent clonal propagation, whether by organogenesis or embryogenesis, may be transformed with a genetic construct of the present invention and a whole plant regenerated from there. The particular tissue chosen will vary depending on the clonal propagation systems available for, and best suited to, the particular species being transformed. Exemplary tissue targets include leaf disks, pollen, embryos, cotyledons, hypocotyls, megagametophytes, callus tissue, existing meristematic tissue (e.g., apical meristem, axillary buds, and root meristems), and induced meristem tissue (e.g., cotyledon meristem and hypocotyl meristem). The polynucleotide may be transiently or stably introduced into a host cell and may be maintained non-integrated, for example, as a plasmid. Alternatively, it may be integrated into the host genome. The resulting transformed plant cell may then be used to regenerate a transformed plant in a manner known to persons skilled in the art.

[0676] Transformation of plant species is now a fairly routine technique. Advantageously, any of several transformation methods may be used to introduce the gene of interest into a suitable ancestor cell. Transformation methods include the use of liposomes, electroporation, chemicals that increase free DNA uptake, injection of the DNA directly into the plant, particle gun bombardment, transformation using viruses or pollen and microprojection. Methods may be selected from the calcium/polyethylene glycol method for protoplasts (Krens, F. A. et al. (1982) Nature 296, 72-74; Negrutiu I et al. (1987) Plant Mol Biol 8: 363-373); electroporation of protoplasts (Shillito R. D. et al. (1985) Bio/Technol 3, 1099-1102); microinjection into plant material (Crossway A et al. (1986) Mol. Gen Genet 202: 179-185); DNA or RNA-coated particle bombardment (Klein T M et al. (1987) Nature 327: 70) infection with (non-integrative) viruses and the like. Transgenic rice plants are preferably produced via Agrobacterium-mediated transformation using any of the well known methods for rice transformation, such as described in any of the following: published European patent application EP 1198985 A1, Aldemita and Hodges (Planta 199: 612-617, 1996); Chan et al. (Plant Mol Biol 22 (3): 491-506, 1993), Hiei et al. (Plant J 6 (2): 271-282, 1994), which disclosures are incorporated by reference herein as if fully set forth. In the case of corn transformation, the preferred method is as described in either Ishida et al. (Nat. Biotechnol 14(6): 745-50, 1996) or Frame et al. (Plant Physiol 129(1): 13-22, 2002), which disclosures are incorporated by reference herein as if fully set forth.

[0677] The genetically modified plant cells can be regenerated via all methods with which the skilled worker is familiar. Suitable methods can be found in the abovementioned publications by S. D. Kung and R. Wu, Potrykus or Hofgen and Willmitzer.

[0678] Generally after transformation, plant cells or cell groupings are selected for the presence of one or more markers which are encoded by plant-expressible genes co-transferred with the gene of interest, following which the transformed material is regenerated into a whole plant. To select transformed plants, the plant material obtained in the transformation is, as a rule, subjected to selective conditions so that transformed plants can be distinguished from untransformed plants. For example, the seeds obtained in the above-described manner can be planted and, after an initial growing period, subjected to a suitable selection by spraying. A further possibility consists in growing the seeds, if appropriate after sterilization, on agar plates using a suitable selection agent so that only the transformed seeds can grow into plants. Alternatively, the transformed plants are screened for the presence of a selectable marker such as the ones described above.

[0679] Following DNA transfer and regeneration, putatively transformed plants may be evaluated, for instance using Southern analysis, for the presence of the gene of interest, copy number and/or genomic organisation. Alternatively or additionally, expression levels of the newly introduced DNA may be monitored using Northern and/or Western analysis, or quantitative PCR, all techniques being well known to persons having ordinary skill in the art.

[0680] The generated transformed plants may be propagated by a variety of means, such as by clonal propagation or classical breeding techniques. For example, a first generation (or T1) transformed plant may be selfed to give homozygous second generation (or T2) transformants, and the T2 plants further propagated through classical breeding techniques.

[0681] The generated transformed organisms may take a variety of forms. For example, they may be chimeras of transformed cells and non-transformed cells; clonal transformants (e.g., all cells transformed to contain the expression cassette); grafts of transformed and untransformed tissues (e.g., in plants, a transformed rootstock grafted to an untransformed scion).

[0682] The present invention clearly extends to any plant cell or plant produced by any of the methods described herein, and to all plant parts and propagules thereof. The present invention extends further to encompass the progeny of a primary transformed or transfected cell, tissue, organ or whole plant that has been produced by any of the aforementioned methods, the only requirement being that progeny exhibit the same genotypic and/or phenotypic characteristic(s) as those produced by the parent in the methods according to the invention.

[0683] The invention also includes host cells containing any one of the nucleic acids described above as being useful in the methods of the invention. Preferred host cells according to the invention are plant cells.

[0684] The methods of the invention are advantageously applicable to any plant. Plants that are particularly useful in the methods of the invention include all plants which belong to the superfamily Viridiplantae, in particular monocotyledonous and dicotyledonous plants including fodder or forage legumes, ornamental plants, food crops, trees or shrubs. According to a preferred embodiment of the present invention, the plant is a crop plant. Examples of crop plants include soybean, sunflower, canola, alfalfa, rapeseed, cotton, tomato, potato and tobacco. Further preferably, the plant is a monocotyledonous plant. Examples of monocotyledonous plants include sugarcane. More preferably the plant is a cereal. Examples of cereals include rice, maize, wheat, barley, millet, rye, triticale, sorghum and oats.

[0685] According to a further preferred embodiment of the present invention, the plant is a crop plant typically cultivated for oil production. Examples of such crop plants for oil production include rapeseed, canola, linseed, soybean, sunflower, maize, oat, rye, barley, wheat, pepper, tagetes, cotton, oil palm, coconut palm, flax, castor, peanut, olive, avocado, sesame, jatropha.

[0686] The invention also extends to harvestable parts of a plant, particularly seeds, but also leaves, fruits, flowers, stems, rhizomes, tubers, roots and bulbs. The invention furthermore relates to products derived, preferably directly derived, from a harvestable part of such a plant, such as dry pellets or powders, oil, fat and fatty acids, starch or proteins. A particular product of interest derived from a harvestable part of a plant is oil.

[0687] The present invention also encompasses use of any of the nucleic acids mentioned herein as being useful in the methods of the invention in modifying seed storage content relative to control plants. Particularly useful is the nucleic acid represented by SEQ ID NO: 229, and any of the nucleic acid sequences given in Table A, and any nucleic acid sequence encoding an orthologue, paralogue or homologue of any of the polypeptide sequences given in Table H. The present invention also encompasses use of a polypeptide sequence represented by SEQ ID NO: 230, and use of a polypeptide sequences given in Table H in modifying seed storage content relative to control plants.

[0688] These nucleic acids or the encoded polypeptides may find use in breeding programmes in which a DNA marker is identified which may be genetically linked to a Class II HD-Zip transcription factor-encoding gene. The nucleic acids/genes, or the polypeptides themselves may be used to define a molecular marker. This DNA or protein marker may then be used in breeding programmes to select plants having modified content of seed storage compounds.

[0689] Allelic variants may also find use in marker-assisted breeding programmes. Such breeding programmes sometimes require introduction of allelic variation by mutagenic treatment of the plants, using for example EMS mutagenesis; alternatively, the programme may start with a collection of allelic variants of so called “natural” origin caused unintentionally. Identification of allelic variants then takes place, for example, by PCR. This is followed by a step for selection of superior allelic variants of the sequence in question and which give increased yield. Selection is typically carried out by monitoring growth performance of plants containing different allelic variants of the sequence in question. Growth performance may be monitored in a greenhouse or in the field. Further optional steps include crossing plants in which the superior allelic variant was identified with another plant. This could be used, for example, to make a combination of interesting phenotypic features.

[0690] The nucleic acids may also be used as probes for genetically and physically mapping the genes that they are a part of, and as markers for traits linked to those genes. Such information may be useful in plant breeding in order to develop lines with desired phenotypes. Such use of requires only a nucleic acid sequence of at least 15 nucleotides in length. The nucleic acids may be used as restriction fragment length polymorphism (RFLP) markers. Southern blots (Sambrook J, Fritsch E F and Maniatis T (1989) Molecular Cloning, A Laboratory Manual) of restriction-digested plant genomic DNA may be probed with the nucleic acids. The resulting banding patterns may then be subjected to genetic analyses using computer programs such as MapMaker (Lander et al. (1987) Genomics 1: 174-181) in order to construct a genetic map. In addition, the nucleic acids may be used to probe Southern blots containing restriction endonuclease-treated genomic DNAs of a set of individuals representing parent and progeny of a defined genetic cross. Segregation of the DNA polymorphisms is noted and used to calculate the position of the nucleic acid in the genetic map previously obtained using this population (Botstein et al. (1980) Am. J. Hum. Genet. 32:314-331).

[0691] The production and use of plant gene-derived probes for use in genetic mapping is described in Bematzky and Tanksley (1986) Plant Mol. Biol. Reporter 4: 37-41. Numerous publications describe genetic mapping of specific cDNA clones using the methodology outlined above or variations thereof. For example, F2 intercross populations, backcross populations, randomly mated populations, near isogenic lines, and other sets of individuals may be used for mapping. Such methodologies are well known to those skilled in the art.

[0692] The nucleic acid probes may also be used for physical mapping (i.e., placement of sequences on physical maps; see Hoheisel et al. In: Non-mammalian Genomic Analysis: A Practical Guide, Academic press 1996, pp. 319-346, and references cited therein).

[0693] In another embodiment, the nucleic acid probes may be used in direct fluorescence in situ hybridisation (FISH) mapping (Trask (1991) Trends Genet. 7:149-154). Although current methods of FISH mapping favor use of large clones (several kb to several hundred kb; see Laan et al. (1995) Genome Res. 5:13-20), improvements in sensitivity may allow performance of FISH mapping using shorter probes.

[0694] A variety of nucleic acid amplification-based methods for genetic and physical mapping may be carried out using the nucleic acids. Examples include allele-specific amplification (Kazazian (1989) J. Lab. Clin. Med 11:95-96), polymorphism of PCR-amplified fragments (CAPS; Sheffield et al. (1993) Genomics 16:325-332), allele-specific ligation (Landegren et al. (1988) Science 241:1077-1080), nucleotide extension reactions (Sokolov (1990) Nucleic Acid Res. 18:3671), Radiation Hybrid Mapping (Walter et al. (1997) Nat. Genet. 7:22-28) and Happy Mapping (Dear and Cook (1989) Nucleic Acid Res. 17:6795-6807). For these methods, the sequence of a nucleic acid is used to design and produce primer pairs for use in the amplification reaction or in primer extension reactions. The design of such primers is well known to those skilled in the art. In methods employing PCR-based genetic mapping, it may be necessary to identify DNA sequence differences between the parents of the mapping cross in the region corresponding to the instant nucleic acid sequence. This, however, is generally not necessary for mapping methods.

[0695] The methods according to the present invention result in plants having modified content of seed storage compounds, as described hereinbefore. These traits may also be combined with other economically advantageous traits, such as yield-enhancing traits, tolerance to other abiotic and biotic stresses, traits modifying various architectural features and/or biochemical and/or physiological features.

### Detailed Description for the SYB1 Polypeptide

[0696] Surprisingly, it has now been found that modulating expression in a plant of a nucleic acid encoding a SYB1 polypeptide gives plants having enhanced yield-related traits relative to control plants. This yield increase was surprisingly observed when the plants were cultivated under conditions without stress (non-stress conditions). The particular class of SYB1 polypeptides suitable for enhancing yield-related traits in plants is described in detail below.

[0697] The present invention provides a method for enhancing yield-related traits in plants relative to control plants, comprising modulating expression in a plant of a nucleic acid encoding a SYB1 polypeptide. The term “modulation” means in relation to expression or gene expression, a process in which the expression level is changed by said gene expression in comparison to the control plant, preferably the expression level is increased. The original, unmodulated expression may be of any kind of expression of a structural RNA (rRNA, tRNA) or mRNA with subsequent translation.

[0698] Any reference hereinafter to a “protein useful in the methods of the invention” is taken to mean a SYB1 polypeptide as defined herein. Any reference hereinafter to a “nucleic acid useful in the methods of the invention” is taken to mean a nucleic acid capable of encoding such a SYB1 polypeptide. The terms “polypeptide” and “protein” are used interchangeably herein and refer to amino acids in a polymeric form of any length. The terms “polynucleotide(s)”, “nucleic acid sequence(s)”, “nucleotide sequence(s)” are used interchangeably herein and refer to nucleotides, either ribonucleotides or deoxyribonucleotides or a combination of both, in a polymeric form of any length.

[0699] A preferred method for modulating (preferably, increasing) expression of a nucleic acid encoding a protein useful in the methods of the invention is by introducing and expressing in a plant a nucleic acid encoding a protein useful in the methods of the invention as defined below.

[0700] The nucleic acid to be introduced into a plant (and therefore useful in performing the methods of the invention) is any nucleic acid encoding the type of protein which will now be described, hereafter also named “SYB1 nucleic acid” or “SYB1 gene”. A “SYB1” polypeptide as defined herein refers to any amino acid sequence comprising 3 Zinc finger domains of the RanBP type (SMART accession number: SM00547, Interpro accession number: IPR001876) and optionally one or more low complexity domain(s), but lacking, when analysed against the SMART database, any other domains that do not overlap with the Zinc finger domains or, if present, the low complexity domain. The ZnF_RBZ type Zinc finger domain is present in Ran-binding proteins (RanBPs), and other proteins. In RanBPs, this domain binds RanGDP. Low complexity domains may be identified using the SEG algorithm of Wootton and Federhen (Methods Enzymol. 266 (1996), pp. 554-571). Preferably SYB1 polypeptides in their natural form (that is, as they occur in nature) are in increasing order of preference, no longer then 350, 300, 290, 280, 270, 260, 250, 240, 230, 220, 210, 190 or 180 amino acids, more preferably the length of SYB1 polypeptide ranges between 180 and 130 amino acids.

[0701] Zinc finger domains are known to bind zinc ions and are generally involved in protein-DNA or protein-protein interactions. Preferably, the Zinc finger domains in the SYB1 protein start with one of the following motifs: (G/R/D/N)DW (motif 1, SEQ ID NO: 344), or GSW (motif 2, SEQ ID NO: 345), and has a first conserved cysteine residue on position 5 (wherein positions 1 to 3 are taken by motif 1 or motif 2), a second conserved cysteine residue between positions 7 and 10, a third conserved cysteine residue between positions 18 and 21 and a fourth conserved cysteine residue between positions 21 and 24. Furthermore, the Zinc finger domain in the SYB1 protein preferably comprises the conserved motifs NF(Q/C/S)(R/K)R (motif 3, SEQ ID NO: 346) or N(F/Y)(A/S/P)(N/S/F)R (motif 4, SEQ ID NO 347).

[0702] Optionally, the sequence located between the Zn-finger domains (say starting after the fourth conserved cysteine residue and ending before the start of motif 1 or 2) is enriched in glycine residues, the glycine content may be as high as 35%, or even higher (whereas the glycine content in an average protein is around 6.93% (SWISS PROT notes, release 44, July 2004)). Additionally or alternatively, the serine content in this sequence may also be increased compared to the serine content in an average protein (6.89%).

[0703] Preferably, the polypeptide sequence which when used in the construction of a phylogenetic tree, such as the one depicted in FIG. 2b, clusters with the group of SYB1 polypeptides comprising the amino acid sequence represented by SEQ ID NO: 286 rather than with any other group.

[0704] Examples of polypeptides useful in the methods of the invention and nucleic acids encoding the same are as given below in the table of Example 40.

[0705] Also useful in the methods of the invention are homologues of any one of the amino acid sequences given in the table of Example 40, and derivatives of any one of the polypeptides given in the table of Example 40 or orthologues or paralogues of any of the aforementioned SEQ ID NOs.

[0706] The invention is illustrated by transforming plants with the Arabidopsis thaliana nucleic acid sequence represented by SEQ ID NO: 285, encoding the polypeptide sequence of SEQ ID NO: 286, however performance of the invention is not restricted to these sequences. The methods of the invention may advantageously be performed using any nucleic acid encoding a protein useful in the methods of the invention as defined herein, including orthologues and paralogues, such as any of the nucleic acid sequences given in the table of Example 40. The amino acid sequences given in the table of Example 40 may be considered to be orthologues and paralogues of the SYB1 polypeptide represented by SEQ ID NO: 286.

[0707] Orthologues and paralogues may easily be found by performing a so-called reciprocal blast search. Typically, this involves a first BLAST involving BLASTing a query sequence (for example using any of the sequences listed in the table of Example 40) against any sequence database, such as the publicly available NCBI database. BLASTN or TBLASTX (using standard default values) are generally used when starting from a nucleotide sequence, and BLASTP or TBLASTN (using standard default values) when starting from a protein sequence. The BLAST results may optionally be filtered. The full-length sequences of either the filtered results or non-filtered results are then BLASTed back (second BLAST) against sequences from the organism from which the query sequence is derived (where the query sequence is SEQ ID NO: 285 or SEQ ID NO: 286, the second BLAST would therefore be against Arabidopsis thaliana sequences). The results of the first and second BLASTs are then compared. A paralogue is identified if a high-ranking hit from the first blast is from the same species as from which the query sequence is derived, a BLAST back then ideally results in the query sequence as highest hit; an orthologue is identified if a high-ranking hit in the first BLAST is not from the same species as from which the query sequence is derived, and preferably results upon BLAST back in the query sequence being among the highest hits.

[0708] High-ranking hits are those having a low E-value. The lower the E-value, the more significant the score (or in other words the lower the chance that the hit was found by chance). Computation of the E-value is well known in the art. In addition to E-values, comparisons are also scored by percentage identity. Percentage identity refers to the number of identical nucleotides (or amino acids) between the two compared nucleic acid (or polypeptide) sequences over a particular length. In the case of large families, ClustalW may be used, followed by a neighbour joining tree, to help visualize clustering of related genes and to identify orthologues and paralogues.

[0709] The table of Example 40 gives examples of orthologues and paralogues of the SYB1 protein represented by SEQ ID NO 286. Further orthologues and paralogues may readily be identified using the BLAST procedure described above.

[0710] The proteins of the invention are identifiable by the presence of three conserved ZnF_RBZ type Zinc finger domain domains (shown in FIG. 22). The terms “domain” and “motif” or “signature” are defined in the “Definitions” section. Specialist databases also exist for the identification of domains, for example, SMART (Schultz et al. (1998) Proc. Natl. Acad. Sci. USA 95, 5857-5864; Letunic et al. (2002) Nucleic Acids Res 30, 242-244, InterPro (Mulder et al., (2003) Nucl. Acids. Res. 31, 315-318, Prosite (Bucher and Bairoch (1994), A generalized profile syntax for biomolecular sequences motifs and its function in automatic sequence interpretation. (In) ISMB-94; Proceedings 2nd International Conference on Intelligent Systems for Molecular Biology. Altman R., Brutlag D., Karp P., Lathrop R., Searls D., Eds., pp 53-61, AAAIPress, Menlo Park; Hulo et al., Nucl. Acids. Res. 32:D134-D137, (2004), or Pfam (Bateman et al., Nucleic Acids Research 30(1): 276-280 (2002). A set of tools for in silico analysis of protein sequences is available on the ExPASY proteomics server (hosted by the Swiss Institute of Bioinformatics (Gasteiger et al., ExPASy: the proteomics server for in-depth protein knowledge and analysis, Nucleic Acids Res. 31:3784-3788 (2003)).

[0711] Domains may also be identified using routine techniques, such as by sequence alignment. Methods for the alignment of sequences for comparison are well known in the art, such methods include GAP, BESTFIT, BLAST, FASTA and TFASTA. GAP uses the algorithm of Needleman and Wunsch ((1970) J Mol Biol 48: 443-453) to find the global (i.e. spanning the complete sequences) alignment of two sequences that maximizes the number of matches and minimizes the number of gaps. The BLAST algorithm (Altschul et al. (1990) J Mol Biol 215: 403-10) calculates percent sequence identity and performs a statistical analysis of the similarity between the two sequences. The software for performing BLAST analysis is publicly available through the National Centre for Biotechnology Information (NCBI). Homologues may readily be identified using, for example, the ClustalW multiple sequence alignment algorithm (version 1.83), with the default pairwise alignment parameters, and a scoring method in percentage. Global percentages of similarity and identity may also be determined using one of the methods available in the MatGAT software package (Campanella et al., BMC Bioinformatics. 2003 Jul. 10; 4:29. MatGAT: an application that generates similarity/identity matrices using protein or DNA sequences.). Minor manual editing may be performed to optimise alignment between conserved motifs, as would be apparent to a person skilled in the art. Furthermore, instead of using full-length sequences for the identification of homologues, specific domains (such as the ZnF_RBZ type Zinc finger domain, or one of the motifs defined above) may be used as well. The sequence identity values, which are indicated below in Example 42 as a percentage were determined over the entire nucleic acid or amino acid sequence, and/or over selected domains or conserved motif(s), using the programs mentioned above using the default parameters. Furthermore, SYB1 proteins (at least in their native form) may interact with proteins or nucleic acids and has the effect of increasing seed yield when expressed according to the methods of the present invention. Further details are provided in Example 45.

[0712] Nucleic acids encoding proteins useful in the methods of the invention need not be full-length nucleic acids, since performance of the methods of the invention does not rely on the use of full-length nucleic acid sequences. Examples of nucleic acids suitable for use in performing the methods of the invention include the nucleic acid sequences given in the table of Example 40, but are not limited to those sequences. Nucleic acid variants may also be useful in practising the methods of the invention. Examples of such nucleic acid variants include portions of nucleic acids encoding a protein useful in the methods of the invention, nucleic acids hybridising to nucleic acids encoding a protein useful in the methods of the invention, splice variants of nucleic acids encoding a protein useful in the methods of the invention, allelic variants of nucleic acids encoding a protein useful in the methods of the invention and variants of nucleic acids encoding a protein useful in the methods of the invention that are obtained by gene shuffling. The terms portion, hybridising sequence, splice variant, allelic variant and gene shuffling will now be described.

[0713] According to the present invention, there is provided a method for enhancing yield-related traits in plants, comprising introducing and expressing in a plant a portion of any one of the nucleic acid sequences given in the table of Example 40, or a portion of a nucleic acid encoding an orthologue, paralogue or homologue of any of the amino acid sequences given in the table of Example 40.

[0714] Portions useful in the methods of the invention, encode a polypeptide falling within the definition of a nucleic acid encoding a protein useful in the methods of the invention as defined herein and having substantially the same biological activity as the amino acid sequences given in the table of Example 40. Preferably, the portion is a portion of any one of the nucleic acids given in the table of Example 40. The portion is typically at least 200 consecutive nucleotides in length, preferably at least 300 consecutive nucleotides in length, more preferably at least 400 consecutive nucleotides in length and most preferably at least 500 consecutive nucleotides in length, the consecutive nucleotides being of any one of the nucleic acid sequences given in the table of Example 40. Most preferably the portion is a portion of the nucleic acid of SEQ ID NO: 285. Preferably, the portion encodes an amino acid sequence comprising three ZnF_RBZ type Zinc finger domains as defined herein. Preferably, the portion encodes an amino acid sequence which when used in the construction of a SYB1 phylogenetic tree, such as the one depicted in FIG. 23b, tends to cluster with the group of SYB1 proteins comprising the amino acid sequence represented by SEQ ID NO: 286 rather than with any other group.

[0715] A portion of a nucleic acid encoding a SYB1 protein as defined herein may be prepared, for example, by making one or more deletions to the nucleic acid. The portions may be used in isolated form or they may be fused to other coding (or non coding) sequences in order to, for example, produce a protein that combines several activities. When fused to other coding sequences, the resultant polypeptide produced upon translation may be bigger than that predicted for the SYB1 protein portion.

[0716] Another nucleic acid variant useful in the methods of the invention is a nucleic acid capable of hybridising, under reduced stringency conditions, preferably under stringent conditions, with a nucleic acid encoding a SYB1 protein as defined herein, or with a portion as defined herein.

[0717] Hybridising sequences useful in the methods of the invention, encode a polypeptide having three ZnF_RBZ type Zinc finger domains (see the alignment of FIG. 23a) and having substantially the same biological activity as the SYB1 protein represented by any of the amino acid sequences given in the table of Example 40. The hybridising sequence is typically at least 200 consecutive nucleotides in length, preferably at least 300 consecutive nucleotides in length, more preferably at least 400 consecutive nucleotides in length and most preferably at least 500 consecutive nucleotides in length, the consecutive nucleotides being of any one of the nucleic acid sequences given in the table of Example 40. Preferably, the hybridising sequence is one that is capable of hybridising to any of the nucleic acids given in the table of Example 40, or to a portion of any of these sequences, a portion being as defined above. Most preferably, the hybridising sequence is capable of hybridising to a nucleic acid as represented by SEQ ID NO: 285 or to a portion thereof. Preferably, the hybridising sequence encodes an amino acid sequence comprising any one or more of the motifs or domains as defined herein. Preferably, the hybridising sequence encodes an amino acid sequence which when used in the construction of a SYB1 phylogenetic tree, such as the one depicted in FIG. 23b, tends to cluster with the group of SYB1 proteins comprising the amino acid sequence represented by SEQ ID NO: 286 rather than with any other group.

[0718] According to the present invention, there is provided a method for enhancing yield-related traits in plants, comprising introducing and expressing in a plant a nucleic acid capable of hybridizing to any one of the nucleic acids given in the table of Example 40, or comprising introducing and expressing in a plant a nucleic acid capable of hybridising to a nucleic acid encoding an orthologue, paralogue or homologue of any of the nucleic acid sequences given in the table of Example 40.

[0719] Another nucleic acid variant useful in the methods of the invention is a splice variant encoding a SYB1 protein as defined hereinabove, the term “splice variant” being as defined above.

[0720] According to the present invention, there is provided a method for enhancing yield-related traits in plants, comprising introducing and expressing in a plant a splice variant of any one of the nucleic acid sequences given in the table of Example 40, or a splice variant of a nucleic acid encoding an orthologue, paralogue or homologue of any of the amino acid sequences given in the table of Example 40.

[0721] Preferred splice variants are splice variants of a nucleic acid represented by SEQ ID NO: 285 or a splice variant of a nucleic acid encoding an orthologue or paralogue of SEQ ID NO: 286. Preferably, the amino acid sequence encoded by the splice variant comprises any one or more of the motifs or domains as defined herein. Preferably, the amino acid sequence encoded by the splice variant, when used in the construction of a SYB1 phylogenetic tree, such as the one depicted in FIG. 23b, tends to cluster with the group of SYB1 proteins comprising the amino acid sequence represented by SEQ ID NO: 286 rather than with any other group.

[0722] Another nucleic acid variant useful in performing the methods of the invention is an allelic variant of a nucleic acid encoding a SYB1 protein as defined hereinabove. Allelic variants exist in nature, and encompassed within the methods of the present invention is the use of these natural alleles. The allelic variants useful in the methods of the present invention have substantially the same biological activity as the SYB1 protein of SEQ ID NO: 286.

[0723] According to the present invention, there is provided a method for enhancing yield-related traits in plants, comprising introducing and expressing in a plant an allelic variant of any one of the nucleic acids given in the table of Example 40, or comprising introducing and expressing in a plant an allelic variant of a nucleic acid encoding an orthologue, paralogue or homologue of any of the amino acid sequences given in the table of Example 40.

[0724] Preferably, the allelic variant is an allelic variant of SEQ ID NO: 285 or an allelic variant of a nucleic acid encoding an orthologue or paralogue of SEQ ID NO: 286. Preferably, the amino acid sequence encoded by the allelic variant comprises any one or more of the motifs or domains as defined herein. Preferably, the amino acid sequence encoded by the allelic variant, when used in the construction of a SYB1 phylogenetic tree, such as the one depicted in FIG. 23b, tends to cluster with the group of SYB1 proteins comprising the amino acid sequence represented by SEQ ID NO: 286 rather than with any other group.

[0725] A further nucleic acid variant useful in the methods of the invention is a nucleic acid variant obtained by gene shuffling, the term “gene shuffling” as described above.

[0726] According to the present invention, there is provided a method for enhancing yield-related traits in plants, comprising introducing and expressing in a plant a variant of any one of the nucleic acid sequences given in the table of Example 40, or comprising introducing and expressing in a plant a variant of a nucleic acid encoding an orthologue, paralogue or homologue of any of the amino acid sequences given in the table of Example 40, which variant nucleic acid is obtained by gene shuffling.

[0727] Preferably, the variant nucleic acid obtained by gene shuffling encodes an amino acid sequence comprising any one or more of the motifs or domains as defined herein. Preferably, the amino acid sequence encoded by the variant nucleic acid obtained by gene shuffling, when used in the construction of a SYB1 phylogenetic tree such as the one depicted in FIG. 23b, tends to cluster with the group of SYB1 proteins comprising the amino acid sequence represented by SEQ ID NO: 286 rather than with any other group.

[0728] Furthermore, nucleic acid variants may also be obtained by site-directed mutagenesis. Several methods are available to achieve site-directed mutagenesis, the most common being PCR based methods (Current Protocols in Molecular Biology. Wiley Eds.).

[0729] Nucleic acids encoding SYB1 proteins may be derived from any natural or artificial source. The nucleic acid may be modified from its native form in composition and/or genomic environment through deliberate human manipulation. Preferably the SYB1-encoding nucleic acid is from a plant, further preferably from a dicotyledonous plant, more preferably from the Brassicaceae family; most preferably the nucleic acid is from Arabidopsis thaliana.

[0730] Any reference herein to a SYB1 protein is therefore taken to mean a SYB1 protein as defined above. Any nucleic acid encoding such a SYB1 protein is suitable for use in performing the methods of the invention.

[0731] The present invention also encompasses plants or parts thereof (including seeds) obtainable by the methods according to the present invention. The plants or parts thereof comprise a nucleic acid transgene encoding a SYB1 protein as defined above.

[0732] The invention also provides genetic constructs and vectors to facilitate introduction and/or expression of the nucleic acid sequences useful in the methods according to the invention, in a plant. Constructs useful in the methods according to the present invention may be constructed using recombinant DNA technology well known to persons skilled in the art. The gene constructs may be inserted into vectors, which may be commercially available, suitable for transforming into plants and suitable for expression of the gene of interest in the transformed cells. The invention also provides use of a gene construct as defined herein in the methods of the invention.

[0733] More specifically, the present invention provides a construct comprising:
[0734] (i) a SYB1 nucleic acid or variant thereof, as defined hereinabove;
[0735] (ii) one or more control sequences operably linked the nucleic acid sequence of (i); and optionally
[0736] (iii) a transcription termination sequence.

[0737] Preferably, the nucleic acid encoding a SYB1 polypeptide is as defined above. The term “control sequence” and “termination sequence” are as defined herein.

[0738] Plants are transformed with a vector comprising the sequence of interest (i.e., a nucleic acid encoding a SYB1 polypeptide as defined herein. The skilled artisan is well aware of the genetic elements that must be present on the vector in order to successfully transform, select and propagate host cells containing the sequence of interest. The sequence of interest is operably linked to one or more control sequences (at least to a promoter). The terms “regulatory element”, “control sequence” and “promoter” are all used interchangeably herein and are defined above.

[0739] Advantageously, any type of promoter may be used to drive expression of the nucleic acid sequence. Preferably, the SYB1 nucleic acid or variant thereof is operably linked to a constitutive promoter. A preferred constitutive promoter is one that is also substantially ubiquitously expressed. Further preferably the promoter is derived from a plant, more preferably a monocotyledonous plant. Most preferred is use of a GOS2 promoter (from rice) (SEQ ID NO: 56 or 343). It should be clear that the applicability of the present invention is not restricted to the SYB1 nucleic acid represented by SEQ ID NO: 285, nor is the applicability of the invention restricted to expression of a SYB1 nucleic acid when driven by a GOS2 promoter. Examples of other constitutive promoters which may also be used to drive expression of a SYB1 nucleic acid are shown above.

[0740] Optionally, one or more terminator sequences may be used in the construct introduced into a plant. Additional regulatory elements may include transcriptional as well as translational enhancers. Those skilled in the art will be aware of terminator and enhancer sequences that may be suitable for use in performing the invention. An intron sequence may also be added to the 5′ untranslated region (UTR) or in the coding sequence to increase the amount of the mature message that accumulates in the cytosol, as described in the definitions section. Other control sequences (besides promoter, enhancer, silencer, intron sequences, 3′UTR and/or 5′UTR regions) may be protein and/or RNA stabilizing elements. Such sequences would be known or may readily be obtained by a person skilled in the art.

[0741] The genetic constructs of the invention may further include an origin of replication sequence that is required for maintenance and/or replication in a specific cell type. One example is when a genetic construct is required to be maintained in a bacterial cell as an episomal genetic element (e.g. plasmid or cosmid molecule). Preferred origins of replication include, but are not limited to, the f1-ori and colE1.

[0742] For the detection of the successful transfer of the nucleic acid sequences as used in the methods of the invention and/or selection of transgenic plants comprising these nucleic acids, it is advantageous to use marker genes (or reporter genes). “Selectable markers” are described in more detail in the definitions section. The marker genes may be removed or excised from the transgenic cell once they are no longer needed. Techniques for marker removal are known in the art, useful techniques are described above in the definitions section.

[0743] The invention also provides a method for the production of transgenic plants having enhanced yield-related traits relative to control plants, comprising introduction and expression in a plant of any nucleic acid encoding a SYB1 protein as defined hereinabove.

[0744] More specifically, the present invention provides a method for the production of transgenic plants having increased yield, which method comprises:
[0745] (i) introducing and expressing in a plant or plant cell a SYB1 nucleic acid or variant thereof; and
[0746] (ii) cultivating the plant cell under conditions promoting plant growth and development.

[0747] The nucleic acid of (i) may be any of the nucleic acids capable of encoding a SYB1 polypeptide as defined herein.

[0748] The nucleic acid may be introduced directly into a plant cell or into the plant itself (including introduction into a tissue, organ or any other part of a plant). According to a preferred feature of the present invention, the nucleic acid is preferably introduced into a plant by transformation. The term “transformation” is described in more detail in the “definitions” section herein.

[0749] The genetically modified plant cells can be regenerated via all methods with which the skilled worker is familiar. Suitable methods can be found in the abovementioned publications by S.D. Kung and R. Wu, Potrykus or Hofgen and Willmitzer.

[0750] Generally after transformation, plant cells or cell groupings are selected for the presence of one or more markers which are encoded by plant-expressible genes co-transferred with the gene of interest, following which the transformed material is regenerated into a whole plant. To select transformed plants, the plant material obtained in the transformation is, as a rule, subjected to selective conditions so that transformed plants can be distinguished from untransformed plants. For example, the seeds obtained in the above-described manner can be planted and, after an initial growing period, subjected to a suitable selection by spraying. A further possibility consists in growing the seeds, if appropriate after sterilization, on agar plates using a suitable selection agent so that only the transformed seeds can grow into plants. Alternatively, the transformed plants are screened for the presence of a selectable marker such as the ones described above.

[0751] Following DNA transfer and regeneration, putatively transformed plants may also be evaluated, for instance using Southern analysis, for the presence of the gene of interest, copy number and/or genomic organisation. Alternatively or additionally, expression levels of the newly introduced DNA may be monitored using Northern and/or Western analysis, both techniques being well known to persons having ordinary skill in the art.

[0752] The generated transformed plants may be propagated by a variety of means, such as by clonal propagation or classical breeding techniques. For example, a first generation (or T1) transformed plant may be selfed and homozygous second-generation (or T2) transformants selected, and the T2 plants may then further be propagated through classical breeding techniques.

[0753] The generated transformed organisms may take a variety of forms. For example, they may be chimeras of transformed cells and non-transformed cells; clonal transformants (e.g., all cells transformed to contain the expression cassette); grafts of transformed and untransformed tissues (e.g., in plants, a transformed rootstock grafted to an untransformed scion).

[0754] The present invention clearly extends to any plant cell or plant produced by any of the methods described herein, and to all plant parts and propagules thereof. The present invention extends further to encompass the progeny of a primary transformed or transfected cell, tissue, organ or whole plant that has been produced by any of the aforementioned methods, the only requirement being that progeny exhibit the same genotypic and/or phenotypic characteristic(s) as those produced by the parent in the methods according to the invention.

[0755] The invention also includes host cells containing an isolated nucleic acid encoding a SYB1 protein as defined hereinabove. Preferred host cells according to the invention are plant cells.

[0756] Host plants for the nucleic acids or the vector used in the method according to the invention, the expression cassette or construct or vector are, in principle, advantageously all plants, which are capable of synthesizing the polypeptides used in the inventive method.

[0757] The methods of the invention are advantageously applicable to any plant. Plants that are particularly useful in the methods of the invention include all plants which belong to the superfamily Viridiplantae, in particular monocotyledonous and dicotyledonous plants including fodder or forage legumes, ornamental plants, food crops, trees or shrubs. According to a preferred embodiment of the present invention, the plant is a crop plant. Examples of crop plants include soybean, sunflower, canola, alfalfa, rapeseed, cotton, tomato, potato and tobacco. Further preferably, the plant is a monocotyledonous plant. Examples of monocotyledonous plants include sugarcane. More preferably the plant is a cereal. Examples of cereals include rice, maize, wheat, barley, millet, rye, triticale, sorghum and oats.

[0758] The invention also extends to harvestable parts of a plant such as, but not limited to seeds, leaves, fruits, flowers, stems, rhizomes, tubers and bulbs. The invention furthermore relates to products derived, preferably directly derived, from a harvestable part of such a plant, such as dry pellets or powders, oil, fat and fatty acids, starch or proteins.

[0759] According to a preferred feature of the invention, the modulated expression is increased expression. As mentioned above, a preferred method for modulating (preferably, increasing) expression of a nucleic acid encoding a SYB1 protein is by introducing and expressing in a plant a nucleic acid encoding a SYB1 protein; however the effects of performing the method, i.e. enhancing yield-related traits may also be achieved using other well known techniques. One such technique is T-DNA activation tagging. The effects of the invention may also be reproduced using the technique of TILLING, or with homologous recombination, which allows introduction in a genome of a selected nucleic acid at a defined selected position.

[0760] Performance of the methods of the invention gives plants having enhanced yield-related traits. In particular performance of the methods of the invention gives plants having increased yield, especially increased seed yield relative to control plants. The terms “yield” and “seed yield” are described in more detail in the “definitions” section herein.

[0761] Reference herein to enhanced yield-related traits is taken to mean an increase in biomass (weight) of one or more parts of a plant, which may include aboveground (harvestable) parts and/or (harvestable) parts below ground.

[0762] In particular, such harvestable parts are seeds, and performance of the methods of the invention results in plants having increased seed yield relative to the seed yield of suitable control plants.

[0763] Taking corn as an example, a yield increase may be manifested as one or more of the following: increase in the number of plants established per square meter, an increase in the number of ears per plant, an increase in the number of rows, number of kernels per row, kernel weight, thousand kernel weight, ear length/diameter, increase in the seed filling rate (which is the number of filled seeds divided by the total number of seeds and multiplied by 100), among others. Taking rice as an example, a yield increase may manifest itself as an increase in one or more of the following: number of plants per square meter, number of panicles per plant, number of spikelets per panicle, number of flowers (florets) per panicle (which is expressed as a ratio of the number of filled seeds over the number of primary panicles), increase in the seed filling rate (which is the number of filled seeds divided by the total number of seeds and multiplied by 100), increase in thousand kernel weight, among others.

[0764] Since the transgenic plants according to the present invention have increased yield, it is likely that these plants exhibit an increased growth rate (during at least part of their life cycle), relative to the growth rate of control plants at a corresponding stage in their life cycle. The increased growth rate may be specific to one or more parts of a plant (including seeds), or may be throughout substantially the whole plant. Plants having an increased growth rate may have a shorter life cycle. The life cycle of a plant may be taken to mean the time needed to grow from a dry mature seed up to the stage where the plant has produced dry mature seeds, similar to the starting material. This life cycle may be influenced by factors such as early vigour, growth rate, greenness index, flowering time and speed of seed maturation. The increase in growth rate may take place at one or more stages in the life cycle of a plant or during substantially the whole plant life cycle. Increased growth rate during the early stages in the life cycle of a plant may reflect enhanced vigour. The increase in growth rate may alter the harvest cycle of a plant allowing plants to be sown later and/or harvested sooner than would otherwise be possible (a similar effect may be obtained with earlier flowering time). If the growth rate is sufficiently increased, it may allow for the further sowing of seeds of the same plant species (for example sowing and harvesting of rice plants followed by sowing and harvesting of further rice plants all within one conventional growing period). Similarly, if the growth rate is sufficiently increased, it may allow for the further sowing of seeds of different plants species (for example the planting and harvesting of corn plants followed by, for example, the planting and optional harvesting of soy bean, potato or any other suitable plant). Harvesting additional times from the same rootstock in the case of some crop plants may also be possible. Altering the harvest cycle of a plant may lead to an increase in annual biomass production per square meter (due to an increase in the number of times (say in a year) that any particular plant may be grown and harvested). An increase in growth rate may also allow for the cultivation of transgenic plants in a wider geographical area than their wild-type counterparts, since the territorial limitations for growing a crop are often determined by adverse environmental conditions either at the time of planting (early season) or at the time of harvesting (late season). Such adverse conditions may be avoided if the harvest cycle is shortened. The growth rate may be determined by deriving various parameters from growth curves, such parameters may be: T-Mid (the time taken for plants to reach 50% of their maximal size) and T-90 (time taken for plants to reach 90% of their maximal size), amongst others.

[0765] According to a preferred feature of the present invention, performance of the methods of the invention gives plants having an increased growth rate relative to control plants. Therefore, according to the present invention, there is provided a method for increasing the growth rate of plants, which method comprises modulating expression, preferably increasing expression, in a plant of a nucleic acid encoding a SYB1 protein as defined herein.

[0766] An increase in yield and/or growth rate occurs whether the plant is under non-stress conditions or whether the plant is exposed to various stresses compared to control plants. Plants typically respond to exposure to stress by growing more slowly. In conditions of severe stress, the plant may even stop growing altogether. Mild stress on the other hand is defined herein as being any stress to which a plant is exposed which does not result in the plant ceasing to grow altogether without the capacity to resume growth. Mild stress in the sense of the invention leads to a reduction in the growth of the stressed plants of less than 40%, 35% or 30%, preferably less than 25%, 20% or 15%, more preferably less than 14%, 13%, 12%, 11% or 10% or less in comparison to the control plant under non-stress conditions. Due to advances in agricultural practices (irrigation, fertilization, pesticide treatments) severe stresses are not often encountered in cultivated crop plants. As a consequence, the compromised growth induced by mild stress is often an undesirable feature for agriculture. Mild stresses are the everyday biotic and/or abiotic (environmental) stresses to which a plant is exposed. Abiotic stresses may be due to drought or excess water, anaerobic stress, salt stress, chemical toxicity, oxidative stress and hot, cold or freezing temperatures. The abiotic stress may be an osmotic stress caused by a water stress (particularly due to drought), salt stress, oxidative stress or an ionic stress. Biotic stresses are typically those stresses caused by pathogens, such as bacteria, viruses, fungi and insects.

[0767] In particular, the methods of the present invention may be performed under non-stress conditions or under conditions of mild drought to give plants having increased yield relative to control plants. As reported in Wang et al. (Planta (2003) 218: 1-14), abiotic stress leads to a series of morphological, physiological, biochemical and molecular changes that adversely affect plant growth and productivity. Drought, salinity, extreme temperatures and oxidative stress are known to be interconnected and may induce growth and cellular damage through similar mechanisms. Rabbani et al. (Plant Physiol (2003) 133: 1755-1767) describes a particularly high degree of “cross talk” between drought stress and high-salinity stress. For example, drought and/or salinisation are manifested primarily as osmotic stress, resulting in the disruption of homeostasis and ion distribution in the cell. Oxidative stress, which frequently accompanies high or low temperature, salinity or drought stress, may cause denaturing of functional and structural proteins. As a consequence, these diverse environmental stresses often activate similar cell signaling pathways and cellular responses, such as the production of stress proteins, up-regulation of anti-oxidants, accumulation of compatible solutes and growth arrest. The term “non-stress” conditions as used herein are those environmental conditions that allow optimal growth of plants. Persons skilled in the art are aware of normal soil conditions and climatic conditions for a given location.

[0768] Performance of the methods of the invention gives plants grown under non-stress conditions or under mild drought conditions increased yield relative to suitable control plants grown under comparable conditions. Therefore, according to the present invention, there is provided a method for increasing yield in plants grown under non-stress conditions or under mild drought conditions, which method comprises increasing expression in a plant of a nucleic acid encoding a SYB1 polypeptide.

[0769] Performance of the methods of the invention gives plants grown under conditions of nutrient deficiency, particularly under conditions of nitrogen deficiency, increased yield relative to control plants grown under comparable conditions. Therefore, according to the present invention, there is provided a method for increasing yield in plants grown under conditions of nutrient deficiency, which method comprises increasing expression in a plant of a nucleic acid encoding a SYB1 polypeptide. Nutrient deficiency may result from a lack of nutrients such as nitrogen, phosphates and other phosphorous-containing compounds, potassium, calcium, cadmium, magnesium, manganese, iron and boron, amongst others.

[0770] In a preferred embodiment of the invention, the increase in yield and/or growth rate occurs according to the methods of the present invention under non-stress conditions.

[0771] The present invention also encompasses use of nucleic acids encoding the SYB1 protein described herein and use of these SYB1 proteins in enhancing yield-related traits in plants. The present invention furthermore encompasses use of plants

[0772] Nucleic acids encoding the SYB1 protein described herein, or the SYB1 proteins themselves, may find use in breeding programmes in which a DNA marker is identified which may be genetically linked to a SYB1-encoding gene. The nucleic acids/genes, or the SYB1 proteins themselves may be used to define a molecular marker. This DNA or protein marker may then be used in breeding programmes to select plants having enhanced yield-related traits as defined hereinabove in the methods of the invention.

[0773] Allelic variants of a SYB1 protein-encoding nucleic acid/gene may also find use in marker-assisted breeding programmes. Such breeding programmes sometimes require introduction of allelic variation by mutagenic treatment of the plants, using for example EMS mutagenesis; alternatively, the programme may start with a collection of allelic variants of so called “natural” origin caused unintentionally. Identification of allelic variants then takes place, for example, by PCR. This is followed by a step for selection of superior allelic variants of the sequence in question and which give increased yield. Selection is typically carried out by monitoring growth performance of plants containing different allelic variants of the sequence in question. Growth performance may be monitored in a greenhouse or in the field. Further optional steps include crossing plants in which the superior allelic variant was identified with another plant. This could be used, for example, to make a combination of interesting phenotypic features.

[0774] Nucleic acids encoding SYB1 proteins may also be used as probes for genetically and physically mapping the genes that they are a part of, and as markers for traits linked to those genes. Such information may be useful in plant breeding in order to develop lines with desired phenotypes. Such use of SYB1 protein-encoding nucleic acids requires only a nucleic acid sequence of at least 15 nucleotides in length. The SYB1 protein-encoding nucleic acids may be used as restriction fragment length polymorphism (RFLP) markers. Southern blots (Sambrook J, Fritsch EF and Maniatis T (1989) Molecular Cloning, A Laboratory Manual) of restriction-digested plant genomic DNA may be probed with the SYB1 protein-encoding nucleic acids. The resulting banding patterns may then be subjected to genetic analyses using computer programs such as MapMaker (Lander et al. (1987) Genomics 1: 174-181) in order to construct a genetic map. In addition, the nucleic acids may be used to probe Southern blots containing restriction endonuclease-treated genomic DNAs of a set of individuals representing parent and progeny of a defined genetic cross. Segregation of the DNA polymorphisms is noted and used to calculate the position of the SYB1 protein-encoding nucleic acid in the genetic map previously obtained using this population (Botstein et al. (1980) Am. J. Hum. Genet. 32:314-331).

[0775] The production and use of plant gene-derived probes for use in genetic mapping is described in Bernatzky and Tanksley (1986) Plant Mol. Biol. Reporter 4: 37-41. Numerous publications describe genetic mapping of specific cDNA clones using the methodology outlined above or variations thereof. For example, F2 intercross populations, backcross populations, randomly mated populations, near isogenic lines, and other sets of individuals may be used for mapping. Such methodologies are well known to those skilled in the art.

[0776] The nucleic acid probes may also be used for physical mapping (i.e., placement of sequences on physical maps; see Hoheisel et al. In: Non-mammalian Genomic Analysis: A Practical Guide, Academic press 1996, pp. 319-346, and references cited therein).

[0777] In another embodiment, the nucleic acid probes may be used in direct fluorescence in situ hybridisation (FISH) mapping (Trask (1991) Trends Genet. 7:149-154). Although current methods of FISH mapping favour use of large clones (several kb to several hundred kb; see Laan et al. (1995) Genome Res. 5:13-20), improvements in sensitivity may allow performance of FISH mapping using shorter probes.

[0778] A variety of nucleic acid amplification-based methods for genetic and physical mapping may be carried out using the nucleic acids. Examples include allele-specific amplification (Kazazian (1989) J. Lab. Clin. Med 11:95-96), polymorphism of PCR-amplified fragments (CAPS; Sheffield et al. (1993) Genomics 16:325-332), allele-specific ligation (Landegren et al. (1988) Science 241:1077-1080), nucleotide extension reactions (Sokolov (1990) Nucleic Acid Res. 18:3671), Radiation Hybrid Mapping (Walter et al. (1997) Nat. Genet. 7:22-28) and Happy Mapping (Dear and Cook (1989) Nucleic Acid Res. 17:6795-6807). For these methods, the sequence of a nucleic acid is used to design and produce primer pairs for use in the amplification reaction or in primer extension reactions. The design of such primers is well known to those skilled in the art. In methods employing PCR-based genetic mapping, it may be necessary to identify DNA sequence differences between the parents of the mapping cross in the region corresponding to the instant nucleic acid sequence. This, however, is generally not necessary for mapping methods.

[0779] The methods according to the present invention result in plants having enhanced yield-related traits, as described hereinbefore. These traits may also be combined with other economically advantageous traits, such as further yield-enhancing traits, tolerance to other abiotic and biotic stresses, traits modifying various architectural features and/or biochemical and/or physiological features.

### DESCRIPTION OF FIGURES

[0780] The present invention will now be described with reference to the following figures in which:

[0781] FIG. 1 shows an example of the domain structure of an AZ polypeptide. The protein encoded by SEQ ID NO: 2 comprises two ankyrin repeats (bold, underlined) and two C3H1 domains (italics, underlined).

[0782] FIG. 2 shows the Ankyrin (ANK) and C3H1 Zinc finger (C3H1) consensus sequences according to the SMART database, the symbols for the various amino acid groups are given in the legend.

[0783] FIG. 3 represents a sequence identity/similarity matrix prepared with MATGAT (BLOSUM62, gap opening penalty 11, gap extension penalty 1). Above the diagonal, in bold, the sequence identities are displayed, below the diagonal, sequence similarities are given for: A) full length protein sequences, B) partial protein sequences comprising the most C-terminal putative Zn-finger domain.

[0784] FIG. 4 shows the binary vector p056, for expression in Oryza sativa of an Arabidopsis thaliana AZ coding sequence under the control of a WSI18 promoter (internal reference PRO0151).

[0785] FIG. 5 shows the typical domain structure of SYT polypeptides from plants and mammals. The conserved SNH domain is located at the N-terminal end of the polypeptide. The C-terminal remainder of the polypeptide consists of a QG-rich domain in plant SYT polypeptides, and of a QPGY-rich domain in mammalian SYT polypeptides. A Met-rich domain is typically comprised within the first half of the QG-rich (from the N-term to the C-term) in plants or QPGY-rich in mammals. A second Met-rich domain may precede the SNH domain in plant SYT polypeptides

[0786] FIG. 6 shows a multiple alignment of the N-terminal end of several SYT polypeptides, using VNTI AlignX multiple alignment program, based on a modified ClustalW algorithm (InforMax, Bethesda, Md., http://www.informaxinc.com), with default settings for gap opening penalty of 10 and a gap extension of 0.05). The SNH domain is boxed across the plant and human SYT polypeptides. The last line in the alignment consists of a consensus sequence derived from the aligned sequences.

[0787] FIG. 7 shows a multiple alignment of several plant SYT polypeptides, using VNTI AlignX multiple alignment program, based on a modified ClustalW algorithm (InforMax, Bethesda, Md., http://www.informaxinc.com), with default settings for gap opening penalty of 10 and a gap extension of 0.05). The two main domains, from N-terminal to C-terminal, are boxed and identified as SNH domain and the Met-rich/QG-rich domain. Additionally, the N-terminal Met-rich domain is also boxed, and the positions of SEQ ID NO: 90 and SEQ ID NO 91 are underlined in bold.

[0788] FIG. 8 shows a Neighbour joining tree resulting from the alignment of multiple SYT polypeptides using CLUSTALW 1.83 (http://align.genome.jp/sit-bin/clustalw). The SYT1 and SYT2/SYT3 clades are identified with brackets.

[0789] FIG. 9 shows a binary vector p0523, for expression in Oryza sativa of an Arabidopsis thaliana AtSYT1 under the control of a GOS2 promoter (internal reference PR00129).

[0790] FIG. 10 is an overview of the Calvin cycle. The thirteen enzymatic reactions are shown, as well as the enzyme names that perform these reactions. The black arrow shows the position of cpFBPase in the cycle.

[0791] FIG. 11 is a scheme showing the light-activation of cpFBPase via the ferredoxin-thioredoxin system.

[0792] FIG. 12 is an alignment of cyFBPase polypeptides and cpFBPase polypeptides. The polypeptide sequences were aligned using AlignX program from Vector NTI suite (InforMax, Bethesda, Md.). Multiple alignment was done with a gap opening penalty of 10 and a gap extension of 0.01. The predicted chloroplastic transit peptide of the cpFBPase polypeptides is boxed. The redox regulatory insertion and the cysteines involved in disulfide bridge formation are indicated. Finally, the active site region is also boxed, and the amino acid residues Asn237, Tyr269, Tyr289 and Arg268 which bind the 6-phosphate of fructose-1,6-bisphosphate, and Lys299 which binds the fructose are shown.

[0793] FIG. 13 shows a binary vector p1597, for increased expression in Oryza sativa of a Chlamydomonas reindhardtii nucleic acid encoding a cpFBPase polypeptide under the control of a GOS2 promoter (internal reference PRO0129).

[0794] FIG. 14 is an alignment of SIK nucleic acids encoding putative SIK orthologues described in Table 2.

[0795] FIG. 15 is an alignment of rice SIK polypeptide (SEQ ID NO: 2) and Arabidopsis SIK polypeptide (SEQ ID NO: 4) and OSSIK polypeptide having NCB! accession number OS_BAD73441.

[0796] FIG. 16 represents the binary for vector endogenous gene silencing in Oryza sativa using a SIK nucleic acid represented by SEQ ID NO: 1 using a hairpin construct under the control of a constitutive promoter, GOS2.

[0797] FIG. 17 shows a binary vector for expression in Oryza sativa of a SIK-encoding nucleic acid from Oryza sativa under the control of a GOS2 promoter.

[0798] FIG. 18 shows a section of a HD-Zip phylogenetic tree showing Class II HD-Zip members.

[0799] FIG. 19 shows an alignment of several Class II HD-Zip polypeptide sequences.

[0800] FIG. 20 is an alignment taken from Henrikson et al., 2005 (Plant Physiol, Vol. 139, pp. 509-518). The Leu Zip domains in all HDZip I and II proteins are in identical positions, C terminal to the HD. The HDZip domains of HDZip I and II proteins are similar to each other in sequence, although a number of amino acid positions distinguish HDZip I from II. The amino acid at position 46 is invariant within the HDZip I and II, but distinct between the classes. Several other amino acids, e.g. the ones at positions 6, 25, 29, 30, 58, and 61, are invariable within the HDZip II and differ from HDZip I amino acids, which show variation at these positions.

[0801] FIG. 21 shows a binary vector for increased expression in Oryza sativa of the Arabidopsis thaliana Class II HD-Zip transcription factor (HAT4)-encoding nucleic acid under the control of a GOS2 promoter.

[0802] FIG. 22 shows the domain structure of two examples of SYB1 proteins. The Zinc finger domains are indicated in underlined bold.

[0803] FIG. 23a shows a multiple alignment of various SYB1 proteins (the sequences used are: CDS2671 (SEQ ID NO: 2), AAZ94630 (SEQ ID NO: 4), Q53AV6 (SEQ ID NO: 6), Q6Z6E6 (SEQ ID NO: 8), Q8GWD1 (SEQ ID NO: 10), Q9SW92 (SEQ ID NO: 12), Q8RYZ5 (SEQ ID NO: 14), beta vulgaris (SEQ ID NO: 16), Q8S8K1 (SEQ ID NO: 18), Q8GZ43 (SEQ ID NO: 20), Q7F1K4 (SEQ ID NO: 22), Q7XHQ8 (SEQ ID NO: 24)); FIG. 23b shows a phylogenetic tree in which the black box delineates the group of SYB1 proteins.

[0804] FIG. 24 shows the binary vector for increased expression in Oryza sativa of an Arabidopsis thaliana SYB1 protein-encoding nucleic acid under the control of a GOS2 promoter (internal reference PRO0129).

[0805] FIG. 25 details examples of sequences useful in performing the methods according to the present invention. SEQ ID NO: 1 to SEQ ID NO: 56 relate to AZ sequences. SEQ ID NO: 1 and 2 represent the AZ coding sequence CDS3104 and the deduced protein sequence. SEQ ID NO: 53 and 47 represent the AZ coding sequence CDS3108 and the deduced protein sequence. SEQ ID NO: 3 to 6 represent conserved sequences that may be present in an AZ protein, SEQ ID NO: 9 and 55 represent sequences of the WSI18 promoter used in the examples section. SEQ ID NO: 10 to 52 are examples of sequences of other AZ proteins and nucleic acids encoding these proteins, SEQ ID NO: 54 and 56 are the sequences of the rice GOS2 promoter.

[0806] SEQ ID NO: 56 to 153 relate to SYT sequences. SYT nucleic acid sequences are presented from start to stop. The majority of these sequences are derived from EST sequencing, which is of lower quality. Therefore, nucleic acid substitutions may be encountered.

[0807] SEQ ID NO: 56, and SEQ ID NO: 154 to 208 represent examples of sequences relating to cpFBPase, useful in performing the methods according to the present invention.

[0808] SEQ ID NO: 56 and 209 to 228 are examples of sequences useful in performing the methods according to the present invention relating to SIK proteins/nucleic acids, or useful in isolating such sequences. Sequences may result from public EST assemblies, with lesser quality sequencing. As a consequence, a few nucleic acid substitutions may be expected. The 5′ and 3′ UTR of the naturally transcribed sequences may also be used for the performing the methods of the invention for the reduction or substantial elimination of endogenous SIK gene expression.

[0809] SEQ ID NO: 229 to 284 are examples of sequences useful in performing the methods according to the present invention relating to Class II HD-Zip transcription factor (HAT4).

[0810] SEQ ID NO: 56, and SEQ ID NO: 285 to 347 are examples of sequences relating to SYB1 proteins and nucleic acids and are useful in performing the methods according to the present invention.

### EXAMPLES

[0811] The present invention will now be described with reference to the following examples, which are by way of illustration alone. The following examples are not intended to completely define or otherwise limit the scope of the invention.

[0812] DNA manipulation: unless otherwise stated, recombinant DNA techniques are performed according to standard protocols described in (Sambrook (2001) Molecular Cloning: a laboratory manual, 3rd Edition Cold Spring Harbor Laboratory Press, CSH, New York) or in Volumes 1 and 2 of Ausubel et al. (1994), Current Protocols in Molecular Biology, Current Protocols. Standard materials and methods for plant molecular work are described in Plant Molecular Biology Labfax (1993) by R.D.D. Croy, published by BIOS Scientific Publications Ltd (UK) and Blackwell Scientific Publications (UK).

### Example 1

### Identification of Sequences Related to the Nucleic Acid Sequence used in the Methods of the Invention

[0813] Sequences (full length cDNA, ESTs or genomic) related to the nucleic acid sequence used in the methods of the present invention were identified amongst those maintained in the Entrez Nucleotides database at the National Center for Biotechnology Information (NCBI) using database sequence search tools, such as the Basic Local Alignment Tool (BLAST) (Altschul et al. (1990) J. Mol. Biol. 215:403-410; and Altschul et al. (1997) Nucleic Acids Res. 25:3389-3402). The program is used to find regions of local similarity between sequences by comparing nucleic acid or polypeptide sequences to sequence databases and by calculating the statistical significance of matches. For example, the polypeptide encoded by the nucleic acid used in the present invention was used for the TBLASTN algorithm, with default settings and the filter to ignore low complexity sequences set off. The output of the analysis was viewed by pairwise comparison, and ranked according to the probability score (E-value), where the score reflect the probability that a particular alignment occurs by chance (the lower the E-value, the more significant the hit). In addition to E-values, comparisons were also scored by percentage identity. Percentage identity refers to the number of identical nucleotides (or amino acids) between the two compared nucleic acid (or polypeptide) sequences over a particular length. In some instances, the default parameters may be adjusted to modify the stringency of the search. For example the E-value may be increased to show less stringent matches. This way, short nearly exact matches may be identified.

[0814] Table A provides a list of nucleic acid sequences related to the nucleic acid sequence used in the methods of the present invention.

TABLE A
Examples of AZ polypeptides:

| | Nucleic acid | Protein |
|---|---|---|
| Plant Source | SEQ ID NO: | SEQ ID NO: |
| Arabidopsis thaliana | 1 | 2 |
| Eucalyptus grandis | 10 | 11 |
| Oryza sativa | 12 | 13 |
| Medicago truncatula | 14 | 15 |
| Oryza sativa | 16 | 17 |
| Arabidopsis thaliana | 18 | 19 |
| Oryza sativa | 20 | 21 |
| Arabidopsis thaliana | 22 | 23 |
| Arabidopsis thaliana | 24 | 25 |
| Eucalyptus grandis | 26 | 27 |
| Eucalyptus grandis | 28 | 29 |
| Glycine max | 30 | 31 |
| Eucalyptus grandis | 32 | 33 |
| Arabidopsis thaliana | 34 | 35 |
| Oryza sativa | 36 | 37 |
| Hordeum_vulgare | 38 | 39 |
| Pinus radiata | 40 | 41 |
| Pinus radiata | 42 | 43 |
| Glycine max | | 44 |
| Glycine max | | 45 |
| Glycine max | | 46 |
| Arabidopsis thaliana | | 47 |
| Arabidopsis thaliana | | 48 |
| Arabidopsis thaliana | | 49 |
| Arabidopsis thaliana | | 50 |
| Arabidopsis thaliana | | 51 |
| Arabidopsis thaliana | | 52 |
| Arabidopsis thaliana | 53 | |

[0815] In some instances, related sequences have tentatively been assembled and publicly disclosed by research institutions, such as The Institute for Genomic Research (TIGR). The Eukaryotic Gene Orthologs (EGO) database may be used to identify such related sequences, either by keyword search or by using the BLAST algorithm with the nucleic acid or polypeptide sequence of interest.

### Example 2

### Gene Cloning of AZ

[0816] The Arabidopsis AZ encoding gene (CDS3104) was amplified by PCR using as template an Arabidopsis thaliana seedling cDNA library (Invitrogen, Paisley, UK). After reverse transcription of RNA extracted from seedlings, the cDNAs were cloned into pCMV Sport 6.0. Average insert size of the bank was 1.5 kb, and the original number of clones was of 1.59×10⁷ cfu. Original titer was determined to be 9.6×10⁵ cfu/ml, after a first amplification of 6×10¹¹ cfu/ml. After plasmid extraction, 200 ng of template was used in a 50 μl PCR mix. Primers prm06717 (sense, AttB1 site in italic, start codon in bold: 5′-ggggacaagtttgtacaaaaaagcaggcttaaacaatgtgctgtggatcagacc-3′) (SEQ ID NO 7) and prm06718 (reverse, complementary, AttB2 site in italic: 5′-ggggaccactttgtacaagaaagctgggtggttaggtctctcaattctgc-3′) (SEQ ID NO 8), which include the AttB sites for Gateway recombination, were used for PCR amplification. PCR was performed using Hifi Taq DNA polymerase in standard conditions. A PCR fragment of the expected size was amplified and purified also using standard methods. The first step of the Gateway procedure, the BP reaction, was then performed, during which the PCR fragment recombines in vivo with the pDONR201 plasmid to produce, according to the Gateway terminology, an “entry clone”, p07. Plasmid pDONR201 was purchased from Invitrogen, as part of the Gateway® technology.

### Example 3

### Vector Construction

[0817] The entry clone p07 were subsequently used in an LR reaction with p02417, a destination vector used for plant (Oryza sativa) transformation. This vector contains as functional elements within the T-DNA borders: a plant selectable marker; a screenable marker expression cassette; and a Gateway cassette intended for LR in vivo recombination with the sequence of interest already cloned in the entry clone. A rice WSI18 promoter (SEQ ID NO: 9) for seed specific expression (PRO0151) was located upstream of this Gateway cassette (p056, FIG. 4).

[0818] Many different binary (and super binary) vector systems have been described for plant transformation (e.g. An, G. in Agrobacterium Protocols. Methods in Molecular Biology vol 44, pp 47-62, Gartland KMA and MR Davey eds. Humana Press, Totowa, N.J.). Many are based on the vector pBIN19 described by Bevan (Nucleic Acid Research. 1984. 12:8711-8721) that includes a plant gene expression cassette flanked by the left and right border sequences from the Ti plasmid of Agrobacterium tumefaciens. A plant gene expression cassette consists of at least two genes—a selection marker gene and a plant promoter regulating the transcription of the cDNA or genomic DNA of the trait gene. Various selection marker genes can be used including the Arabidopsis gene encoding a mutated acetohydroxy acid synthase (AHAS) enzyme (U.S. Pat. Nos. 5,767,3666 and 6,225,105). Similarly, various promoters can be used to regulate the trait gene to provide constitutive, developmental, tissue or environmental regulation of gene transcription.

[0819] After the LR recombination step, the resulting expression vector, p056 (FIG. 4), was transformed into Agrobacterium strain LBA4044 using heat shock or electroporation protocols. Transformed colonies were grown on YEP media and selected by respective antibiotics for two days at 28° C. These Agrobacterium cultures were used for the plant transformation.

[0820] Other Agrobacterium tumefaciens strains can be used for plant transformation and are well known in the art. Examples of such strains are C58C1 or EHA105.

### Example 4

### Plant Transformation

### Rice Transformation

[0821] The Agrobacterium containing the expression vector was used to transform Oryza sativa plants. Mature dry seeds of the rice japonica cultivar Nipponbare were dehusked. Sterilization was carried out by incubating for one minute in 70% ethanol, followed by 30 minutes in 0.2% HgCl₂, followed by a 6 times 15 minutes wash with sterile distilled water. The sterile seeds were then germinated on a medium containing 2,4-D (callus induction medium). After incubation in the dark for four weeks, embryogenic, scutellum-derived calli were excised and propagated on the same medium. After two weeks, the calli were multiplied or propagated by subculture on the same medium for another 2 weeks. Embryogenic callus pieces were sub-cultured on fresh medium 3 days before co-cultivation (to boost cell division activity).

[0822] Agrobacterium strain LBA4404 containing the expression vector was used for cocultivation. Agrobacterium was inoculated on AB medium with the appropriate antibiotics and cultured for 3 days at 28° C. The bacteria were then collected and suspended in liquid co-cultivation medium to a density (OD600) of about 1. The suspension was then transferred to a Petri dish and the calli immersed in the suspension for 15 minutes. The callus tissues were then blotted dry on a filter paper and transferred to solidified, co-cultivation medium and incubated for 3 days in the dark at 25° C. Co-cultivated calli were grown on 2,4-D-containing medium for 4 weeks in the dark at 28° C. in the presence of a selection agent. During this period, rapidly growing resistant callus islands developed. After transfer of this material to a regeneration medium and incubation in the light, the embryogenic potential was released and shoots developed in the next four to five weeks. Shoots were excised from the calli and incubated for 2 to 3 weeks on an auxin-containing medium from which they were transferred to soil. Hardened shoots were grown under high humidity and short days in a greenhouse.

[0823] Approximately 35 independent T0 rice transformants were generated for one construct. The primary transformants were transferred from a tissue culture chamber to a greenhouse. After a quantitative PCR analysis to verify copy number of the T-DNA insert, only single copy transgenic plants that exhibit tolerance to the selection agent were kept for harvest of T1 seed. Seeds were then harvested three to five months after transplanting. The method yielded single locus transformants at a rate of over 50% (Aldemita and Hodges1996, Chan et al. 1993, Hiei et al. 1994).

### Corn Transformation

[0824] Transformation of maize (Zea mays) is performed with a modification of the method described by Ishida et al. (1996) Nature Biotech 14(6): 745-50. Transformation is genotype-dependent in corn and only specific genotypes are amenable to transformation and regeneration. The inbred line A188 (University of Minnesota) or hybrids with A188 as a parent are good sources of donor material for tansformation, but other genotypes can be used successfully as well. Ears are harvested from corn plant approximately 11 days after pollination (DAP) when the length of the immature embryo is about 1 to 1.2 mm. Immature embryos are cocultivated with Agrobacterium tumefaciens containing the expression vector, and transgenic plants are recovered through organogenesis. Excised embryos are grown on callus induction medium, then maize regeneration medium, containing the selection agent (for example imidazolinone but various selection markers can be used). The Petri plates are incubated in the light at 25° C. for 2-3 weeks, or until shoots develop. The green shoots are transferred from each embryo to maize rooting medium and incubated at 25° C. for 2-3 weeks, until roots develop. The rooted shoots are transplanted to soil in the greenhouse. T1 seeds are produced from plants that exhibit tolerance to the selection agent and that contain a single copy of the T-DNA insert.

### Wheat Transformation

[0825] Transformation of wheat is performed with the method described by Ishida et al. (1996) Nature Biotech 14(6): 745-50. The cultivar Bobwhite (available from CIMMYT, Mexico) is commonly used in transformation. Immature embryos are co-cultivated with Agrobacterium tumefaciens containing the expression vector, and transgenic plants are recovered through organogenesis. After incubation with Agrobacterium, the embryos are grown in vitro on callus induction medium, then regeneration medium, containing the selection agent (for example imidazolinone but various selection markers can be used). The Petri plates are incubated in the light at 25° C. for 2-3 weeks, or until shoots develop. The green shoots are transferred from each embryo to rooting medium and incubated at 25° C. for 2-3 weeks, until roots develop. The rooted shoots are transplanted to soil in the greenhouse. T1 seeds are produced from plants that exhibit tolerance to the selection agent and that contain a single copy of the T-DNA insert.

### Soybean Transformation

[0826] Soybean is transformed according to a modification of the method described in the Texas A&M patent U.S. Pat. No. 5,164,310. Several commercial soybean varieties are amenable to transformation by this method. The cultivar Jack (available from the Illinois Seed foundation) is commonly used for transformation. Soybean seeds are sterilised for in vitro sowing. The hypocotyl, the radicle and one cotyledon are excised from seven-day old young seedlings. The epicotyl and the remaining cotyledon are further grown to develop axillary nodes. These axillary nodes are excised and incubated with Agrobacterium tumefaciens containing the expression vector. After the cocultivation treatment, the explants are washed and transferred to selection media. Regenerated shoots are excised and placed on a shoot elongation medium. Shoots no longer than 1 cm are placed on rooting medium until roots develop. The rooted shoots are transplanted to soil in the greenhouse. T1 seeds are produced from plants that exhibit tolerance to the selection agent and that contain a single copy of the T-DNA insert.

### Rapeseed/Canola Transformation

[0827] Cotyledonary petioles and hypocotyls of 5-6 day old young seedling are used as explants for tissue culture and transformed according to Babic et al. (1998, Plant Cell Rep 17: 183-188). The commercial cultivar Westar (Agriculture Canada) is the standard variety used for transformation, but other varieties can also be used. Canola seeds are surface-sterilized for in vitro sowing. The cotyledon petiole explants with the cotyledon attached are excised from the in vitro seedlings, and inoculated with Agrobacterium (containing the expression vector) by dipping the cut end of the petiole explant into the bacterial suspension. The explants are then cultured for 2 days on MSBAP-3 medium containing 3 mg/l BAP, 3% sucrose, 0.7% Phytagar at 23° C., 16 hr light. After two days of co-cultivation with Agrobacterium, the petiole explants are transferred to MSBAP-3 medium containing 3 mg/l BAP, cefotaxime, carbenicillin, or timentin (300 mg/l) for 7 days, and then cultured on MSBAP-3 medium with cefotaxime, carbenicillin, or timentin and selection agent until shoot regeneration. When the shoots are 5-10 mm in length, they are cut and transferred to shoot elongation medium (MSBAP-0.5, containing 0.5 mg/l BAP). Shoots of about 2 cm in length are transferred to the rooting medium (MS0) for root induction. The rooted shoots are transplanted to soil in the greenhouse. T1 seeds are produced from plants that exhibit tolerance to the selection agent and that contain a single copy of the T-DNA insert.

### Alfalfa Transformation

[0828] A regenerating clone of alfalfa (Medicago sativa) is transformed using the method of (McKersie et al., 1999 Plant Physiol 119: 839-847). Regeneration and transformation of alfalfa is genotype dependent and therefore a regenerating plant is required. Methods to obtain regenerating plants have been described. For example, these can be selected from the cultivar Rangelander (Agriculture Canada) or any other commercial alfalfa variety as described by Brown DCW and A Atanassov (1985. Plant Cell Tissue Organ Culture 4: 111-112). Alternatively, the RA3 variety (University of Wisconsin) has been selected for use in tissue culture (Walker et al., 1978 μm J Bot 65:654-659). Petiole explants are cocultivated with an overnight culture of Agrobacterium tumefaciens C58C1 pMP90 (McKersie et al., 1999 Plant Physiol 119: 839-847) or LBA4404 containing the expression vector. The explants are cocultivated for 3 d in the dark on SH induction medium containing 288 mg/L Pro, 53 mg/L thioproline, 4.35 g/L K2SO4, and 100 μm acetosyringinone. The explants are washed in half-strength Murashige-Skoog medium (Murashige and Skoog, 1962) and plated on the same SH induction medium without acetosyringinone but with a suitable selection agent and suitable antibiotic to inhibit Agrobacterium growth. After several weeks, somatic embryos are transferred to BOi2Y development medium containing no growth regulators, no antibiotics, and 50 g/L sucrose. Somatic embryos are subsequently germinated on half-strength Murashige-Skoog medium. Rooted seedlings were transplanted into pots and grown in a greenhouse. T1 seeds are produced from plants that exhibit tolerance to the selection agent and that contain a single copy of the T-DNA insert.

### Example 5

### Evaluation Setup of AZ Expression in Rice under the Control of the Rice WSI18 Promoter

[0829] Approximately 15 to 20 independent T0 rice transformants were generated. The primary transformants were transferred from a tissue culture chamber to a greenhouse for growing and harvest of T1 seed. Seven events, of which the T1 progeny segregated 3:1 for presence/absence of the transgene, were retained. For each of these events, approximately 10 T1 seedlings containing the transgene (hetero- and homo-zygotes) and approximately 10 T1 seedlings lacking the transgene (nullizygotes) were selected by monitoring visual marker expression. The selected T1 plants were transferred to a greenhouse. Each plant received a unique barcode label to link unambiguously the phenotyping data to the corresponding plant. The selected T1 plants were grown on soil in 10 cm diameter, specially designed pots with transparent bottoms to allow visualization of the roots, under the following environmental settings: photoperiod=11.5 h, daylight intensity=30,000 lux or more, daytime temperature=28° C., night time temperature=22° C., relative humidity=60-70%. Transgenic plants and the corresponding nullizygotes were grown side-by-side at random positions. Care was taken that the plants were not subjected to any stress. From the stage of sowing until the stage of maturity the plants were passed several times through a digital imaging cabinet. At each time point digital images (2048×1536 pixels, 16 million colours) were taken of each plant from at least 6 different angles. A digital camera also recorded images through the bottom of the pot during plant growth.

### Drought Screen

[0830] Plants from T2 seeds are grown in potting soil under normal conditions until they approached the heading stage. They are then transferred to a “dry” section where irrigation is withheld. Humidity probes are inserted in randomly chosen pots to monitor the soil water content (SWC). When SWC goes below certain thresholds, the plants are automatically re-watered continuously until a normal level was reached again. The plants are then re-transferred again to normal conditions. The rest of the cultivation (plant maturation, seed harvest) is the same as for plants not grown under abiotic stress conditions. Growth and yield parameters are recorded as detailed for growth under normal conditions.

### Nitrogen use Efficiency Screen

[0831] Rice plants from T2 seeds are grown in potting soil under normal conditions except for the nutrient solution. The pots are watered from transplantation to maturation with a specific nutrient solution containing reduced N nitrogen (N) content, usually between 7 to 8 times less. The rest of the cultivation (plant maturation, seed harvest) is the same as for plants not grown under abiotic stress. Growth and yield parameters are recorded as detailed for growth under normal conditions.

[0832] The plant aboveground area (or leafy biomass) was determined by counting the total number of pixels on the digital images from aboveground plant parts discriminated from the background. This value was averaged for the pictures taken on the same time point from the different angles and was converted to a physical surface value expressed in square mm by calibration. Experiments show that the aboveground plant area measured this way correlates with the biomass of plant parts above ground. The above ground area is the time point at which the plant had reached its maximal leafy biomass. Root features such as total projected area (which can be correlated to total root volume), average diameter and length of roots above a certain thickness threshold (length of thick roots, or length of thin roots) were deduced from the generated image using appropriate software.

[0833] The mature primary panicles were harvested, bagged, barcode-labelled and then dried for three days in the oven at 37° C. The panicles were then threshed and all the seeds collected. The filled husks were separated from the empty ones using an air-blowing device. After separation, both seed lots were then counted using a commercially available counting machine. The empty husks were discarded. The filled husks were weighed on an analytical balance and the cross-sectional area of the seeds was measured using digital imaging. This procedure resulted in the set of the following seed-related parameters:

[0834] The number of filled seeds was determined by counting the number of filled husks that remained after the separation step. The total seed yield (total seed weight) was measured by weighing all filled husks harvested from a plant. Total seed number per plant was measured by counting the number of husks harvested from a plant. The harvest index (HI) in the present invention is defined as the ratio between the total seed yield and the above ground area (mm²), multiplied by a factor 10⁶. Thousand Kernel Weight (TKW) is extrapolated from the number of filled seeds counted and their total weight. The seed fill rate as defined in the present invention is the proportion (expressed as a %) of the number of filled seeds over the total number of seeds (or florets). These parameters were derived in an automated way from the digital images using image analysis software and were analysed statistically. Individual seed parameters (including width, length, area, weight) were measured using a custom-made device consisting of two main components, a weighing and imaging device, coupled to software for image analysis.

[0835] A two factor ANOVA (analyses of variance) corrected for the unbalanced design was used as statistical model for the overall evaluation of plant phenotypic characteristics. An F-test was carried out on all the parameters measured of all the plants of all the events transformed with that gene. The F-test was carried out to check for an effect of the gene over all the transformation events and to verify for an overall effect of the gene, also named herein “global gene effect”. If the value of the F test shows that the data are significant, than it is concluded that there is a “gene” effect, meaning that not only presence or the position of the gene is causing the effect. The threshold for significance for a true global gene effect is set at 5% probability level for the F test.

[0836] To check for an effect of the genes within an event, i.e., for a line-specific effect, a t-test was performed within each event using data sets from the transgenic plants and the corresponding null plants. “Null plants” or “null segregants” or “nullizygotes” are the plants treated in the same way as the transgenic plant, but from which the transgene has segregated. Null plants can also be described as the homozygous negative transformed plants. The threshold for significance for the t-test is set at 10% probability level. The results for some events can be above or below this threshold. This is based on the hypothesis that a gene might only have an effect in certain positions in the genome, and that the occurrence of this position-dependent effect is not uncommon. This kind of gene effect is also named herein a “line effect of the gene”. The p-value is obtained by comparing the t-value to the t-distribution or alternatively, by comparing the F-value to the F-distribution. The p-value then gives the probability that the null hypothesis (i.e., that there is no effect of the transgene) is correct.

[0837] The data obtained for AZ in the first experiment were confirmed in a second experiment with T2 plants. Four lines that had the correct expression pattern were selected for further analysis. Seed batches from the positive plants (both hetero- and homozygotes) in T1, were screened by monitoring marker expression. For each chosen event, the heterozygote seed batches were then retained for T2 evaluation. Within each seed batch an equal number of positive and negative plants were grown in the greenhouse for evaluation.

[0838] A total number of 120 AZ transformed plants were evaluated in the T2 generation, that is 30 plants per event of which 15 positives for the transgene, and 15 negatives.

[0839] Because two experiments with overlapping events had been carried out, a combined analysis was performed. This is useful to check consistency of the effects over the two experiments, and if this is the case, to accumulate evidence from both experiments in order to increase confidence in the conclusion. The method used was a mixed-model approach that takes into account the multilevel structure of the data (i.e. experiment—event—segregants). P-values are obtained by comparing likelihood ratio test to chi square distributions.

### Example 6

### Evaluation of AZ Transformants: Measurement of Yield-Related Parameters

[0840] Upon analysis of the seeds as described above, the inventors found that plants transformed with the AZ gene construct had a higher seed yield, expressed as thousand kernel weight, compared to plants lacking the AZ transgene. Furthermore, increased emergence vigour and increased greenness index was observed in plants carrying the transgene compared to the control plants.

[0841] For one of the constructs, thousand-kernel weight was increased with 2.7% in the T1 generation. These positive results were again obtained in the T2 generation (increase of 2.1%). The T2 data were re-evaluated in a combined analysis with the results for the T1 generation, and the obtained p-values showed that the observed effects were highly significant.

### Example 7

### Gene Cloning of AtSYT1

[0842] The Arabidopsis thaliana AtSYT1 gene was amplified by PCR using as template an Arabidopsis thaliana seedling cDNA library (Invitrogen, Paisley, UK). After reverse transcription of RNA extracted from seedlings, the cDNAs were cloned into pCMV Sport 6.0. Average insert size of the bank was 1.5 kb and the original number of clones was of the order of 1.59×10⁷ cfu. Original titer was determined to be 9.6×10⁵ cfu/ml after first amplification of 6×10¹¹ cfu/ml. After plasmid extraction, 200 ng of template was used in a 50 μl PCR mix. Primers prm06681 (SEQ ID NO: 148; sense, start codon in bold, AttB1 site in italic: 5′-GGGGACAAGTTTG TA CAAAAAAGCAGGCTTAAACAATGCAACAGCACCTGATG -3′) and prm06682 (SEQ ID NO: 149; reverse, complementary, AttB2 site in italic: 5′-GGGGACCACTTTGTACAAGAAAGCTGGG TCATCATTAAGATTCCTTGTG C-3′), which include the AttB sites for Gateway recombination, were used for PCR amplification. PCR was performed using Hifi Taq DNA polymerase in standard conditions. A PCR fragment of 727 by (including attB sites) was amplified and purified also using standard methods. The first step of the Gateway procedure, the BP reaction, was then performed, during which the PCR fragment recombines in vivo with the pDONR201 plasmid to produce, according to the Gateway terminology, an “entry clone”, p07466. Plasmid pDONR201 was purchased from Invitrogen, as part of the Gateway® technology.

### Example 8

### Vector Construction

[0843] The entry clone p07466 was subsequently used in an LR reaction with p00640, a destination vector used for plant (Oryza sativa) transformation. This vector contains as functional elements within the T-DNA borders: a plant selectable marker; a screenable marker expression cassette; and a Gateway cassette intended for LR in vivo recombination with the sequence of interest already cloned in the entry clone. A rice GOS2 promoter (SEQ ID NO: 145) for constitutive expression (PRO0129) was located upstream of this Gateway cassette.

[0844] Many different binary (and super binary) vector systems have been described for plant transformation (e.g. An, G. in Agrobacterium Protocols. Methods in Molecular Biology vol 44, pp 47-62, Gartland KMA and MR Davey eds. Humana Press, Totowa, N.J.). Many are based on the vector pBIN19 described by Bevan (Nucleic Acid Research. 1984. 12:8711-8721) that includes a plant gene expression cassette flanked by the left and right border sequences from the Ti plasmid of Agrobacterium tumefaciens. A plant gene expression cassette consists of at least two genes—a selection marker gene and a plant promoter regulating the transcription of the cDNA or genomic DNA of the trait gene. Various selection marker genes can be used including the Arabidopsis gene encoding a mutated acetohydroxy acid synthase (AHAS) enzyme (U.S. Pat. Nos. 5,767,3666 and 6,225,105). Similarly, various promoters can be used to regulate the trait gene to provide constitutive, developmental, tissue or environmental regulation of gene transcription.

[0845] After the LR recombination step, the resulting expression vector pGOS2::AtSYT1 (FIG. 9) was transformed into Agrobacterium strain LBA4044 using heat shock or electroporation protocols. Transformed colonies were grown on YEP media and selected by respective antibiotics for two days at 28° C. These Agrobacterium cultures were used for the plant transformation.

[0846] Other Agrobacterium tumefaciens strains can be used for plant transformation and are well known in the art. Examples of such strains are C58C1 or EHA105.

### Example 9

### Plant Transformation

### Rice Transformation

[0847] The Agrobacterium containing the expression vector was used to transform Oryza sativa plants. Mature dry seeds of the rice japonica cultivar Nipponbare were dehusked. Sterilization was carried out by incubating for one minute in 70% ethanol, followed by 30 minutes in 0.2% HgCl₂, followed by a 6 times 15 minutes wash with sterile distilled water. The sterile seeds were then germinated on a medium containing 2,4-D (callus induction medium). After incubation in the dark for four weeks, embryogenic, scutellum-derived calli were excised and propagated on the same medium. After two weeks, the calli were multiplied or propagated by subculture on the same medium for another 2 weeks. Embryogenic callus pieces were sub-cultured on fresh medium 3 days before co-cultivation (to boost cell division activity).

[0848] Agrobacterium strain LBA4404 containing the expression vector was used for cocultivation. Agrobacterium was inoculated on AB medium with the appropriate antibiotics and cultured for 3 days at 28° C. The bacteria were then collected and suspended in liquid co-cultivation medium to a density (OD₆₀₀) of about 1. The suspension was then transferred to a Petri dish and the calli immersed in the suspension for 15 minutes. The callus tissues were then blotted dry on a filter paper and transferred to solidified, co-cultivation medium and incubated for 3 days in the dark at 25° C. Co-cultivated calli were grown on 2,4-D-containing medium for 4 weeks in the dark at 28° C. in the presence of a selection agent. During this period, rapidly growing resistant callus islands developed. After transfer of this material to a regeneration medium and incubation in the light, the embryogenic potential was released and shoots developed in the next four to five weeks. Shoots were excised from the calli and incubated for 2 to 3 weeks on an auxin-containing medium from which they were transferred to soil. Hardened shoots were grown under high humidity and short days in a greenhouse.

[0849] Approximately 35 independent TO rice transformants were generated for one construct. The primary transformants were transferred from a tissue culture chamber to a greenhouse. After a quantitative PCR analysis to verify copy number of the T-DNA insert, only single copy transgenic plants that exhibit tolerance to the selection agent were kept for harvest of T1 seed. Seeds were then harvested three to five months after transplanting. The method yielded single locus transformants at a rate of over 50% (Aldemita and Hodges1996, Chan et al. 1993, Hiei et al. 1994).

### Corn Transformation

[0850] Transformation of maize (Zea mays) is performed with a modification of the method described by Ishida et al. (1996) Nature Biotech 14(6): 745-50. Transformation is genotype-dependent in corn and only specific genotypes are amenable to transformation and regeneration. The inbred line A188 (University of Minnesota) or hybrids with A188 as a parent are good sources of donor material for tansformation, but other genotypes can be used successfully as well. Ears are harvested from corn plant approximately 11 days after pollination (DAP) when the length of the immature embryo is about 1 to 1.2 mm. Immature embryos are cocultivated with Agrobacterium tumefaciens containing the expression vector, and transgenic plants are recovered through organogenesis. Excised embryos are grown on callus induction medium, then maize regeneration medium, containing the selection agent (for example imidazolinone but various selection markers can be used). The Petri plates are incubated in the light at 25° C. for 2-3 weeks, or until shoots develop. The green shoots are transferred from each embryo to maize rooting medium and incubated at 25° C. for 2-3 weeks, until roots develop. The rooted shoots are transplanted to soil in the greenhouse. T1 seeds are produced from plants that exhibit tolerance to the selection agent and that contain a single copy of the T-DNA insert.

### Wheat Transformation

[0851] Transformation of wheat is performed with the method described by Ishida et al. (1996) Nature Biotech 14(6): 745-50. The cultivar Bobwhite (available from CIMMYT, Mexico) is commonly used in transformation. Immature embryos are co-cultivated with Agrobacterium tumefaciens containing the expression vector, and transgenic plants are recovered through organogenesis. After incubation with Agrobacterium, the embryos are grown in vitro on callus induction medium, then regeneration medium, containing the selection agent (for example imidazolinone but various selection markers can be used). The Petri plates are incubated in the light at 25° C. for 2-3 weeks, or until shoots develop. The green shoots are transferred from each embryo to rooting medium and incubated at 25° C. for 2-3 weeks, until roots develop. The rooted shoots are transplanted to soil in the greenhouse. T1 seeds are produced from plants that exhibit tolerance to the selection agent and that contain a single copy of the T-DNA insert.

### Soybean Transformation

[0852] Soybean is transformed according to a modification of the method described in the Texas A&M patent U.S. Pat. No. 5,164,310. Several commercial soybean varieties are amenable to transformation by this method. The cultivar Jack (available from the Illinois Seed foundation) is commonly used for transformation. Soybean seeds are sterilised for in vitro sowing. The hypocotyl, the radicle and one cotyledon are excised from seven-day old young seedlings. The epicotyl and the remaining cotyledon are further grown to develop axillary nodes. These axillary nodes are excised and incubated with Agrobacterium tumefaciens containing the expression vector. After the cocultivation treatment, the explants are washed and transferred to selection media. Regenerated shoots are excised and placed on a shoot elongation medium. Shoots no longer than 1 cm are placed on rooting medium until roots develop. The rooted shoots are transplanted to soil in the greenhouse. T1 seeds are produced from plants that exhibit tolerance to the selection agent and that contain a single copy of the T-DNA insert.

[0853] Rapeseed/Canola Transformation

[0854] Cotyledonary petioles and hypocotyls of 5-6 day old young seedling are used as explants for tissue culture and transformed according to Babic et al. (1998, Plant Cell Rep 17: 183-188). The commercial cultivar Westar (Agriculture Canada) is the standard variety used for transformation, but other varieties can also be used. Canola seeds are surface-sterilized for in vitro sowing. The cotyledon petiole explants with the cotyledon attached are excised from the in vitro seedlings, and inoculated with Agrobacterium (containing the expression vector) by dipping the cut end of the petiole explant into the bacterial suspension. The explants are then cultured for 2 days on MSBAP-3 medium containing 3 mg/l BAP, 3% sucrose, 0.7% Phytagar at 23° C., 16 hr light. After two days of co-cultivation with Agrobacterium, the petiole explants are transferred to MSBAP-3 medium containing 3 mg/l BAP, cefotaxime, carbenicillin, or timentin (300 mg/l) for 7 days, and then cultured on MSBAP-3 medium with cefotaxime, carbenicillin, or timentin and selection agent until shoot regeneration. When the shoots are 5-10 mm in length, they are cut and transferred to shoot elongation medium (MSBAP-0.5, containing 0.5 mg/l BAP). Shoots of about 2 cm in length are transferred to the rooting medium (MSO) for root induction. The rooted shoots are transplanted to soil in the greenhouse. T1 seeds are produced from plants that exhibit tolerance to the selection agent and that contain a single copy of the T-DNA insert.

### Alfalfa Transformation

[0855] A regenerating clone of alfalfa (Medicago sativa) is transformed using the method of (McKersie et al., 1999 Plant Physiol 119: 839-847). Regeneration and transformation of alfalfa is genotype dependent and therefore a regenerating plant is required. Methods to obtain regenerating plants have been described. For example, these can be selected from the cultivar Rangelander (Agriculture Canada) or any other commercial alfalfa variety as described by Brown DCW and A Atanassov (1985. Plant Cell Tissue Organ Culture 4: 111-112). Alternatively, the RA3 variety (University of Wisconsin) has been selected for use in tissue culture (Walker et al., 1978 μm J Bot 65:654-659). Petiole explants are cocultivated with an overnight culture of Agrobacterium tumefaciens C58C1 pMP90 (McKersie et al., 1999 Plant Physiol 119: 839-847) or LBA4404 containing the expression vector. The explants are cocultivated for 3 d in the dark on SH induction medium containing 288 mg/L Pro, 53 mg/L thioproline, 4.35 g/L K2SO4, and 100 μm acetosyringinone. The explants are washed in half-strength Murashige-Skoog medium (Murashige and Skoog, 1962) and plated on the same SH induction medium without acetosyringinone but with a suitable selection agent and suitable antibiotic to inhibit Agrobacterium growth. After several weeks, somatic embryos are transferred to BOi2Y development medium containing no growth regulators, no antibiotics, and 50 g/L sucrose. Somatic embryos are subsequently germinated on half-strength Murashige-Skoog medium. Rooted seedlings were transplanted into pots and grown in a greenhouse. T1 seeds are produced from plants that exhibit tolerance to the selection agent and that contain a single copy of the T-DNA insert.

### Example 10

### Evaluation Setup of AtSYT1 Transgenic Rice Plants under Abiotic Stress

[0856] Four events, of which the T1 progeny segregated 3:1 for presence/absence of the transgene, were retained. For each of these events, approximately 15 T1 seedlings containing the transgene (hetero- and homo-zygotes) and approximately 15 T1 seedlings lacking the transgene (nullizygotes) were selected by monitoring visual marker expression. The transgenic plants and the corresponding nullizygotes were grown side-by-side at random positions. Greenhouse conditions were of shorts days (12 hours light), with temperatures on average 28° C. in the light and 22° C. in the dark, and a relative humidity on average of 70%.

### Salt Stress Screen

[0857] Plants were grown on a substrate made of coco fibers and argex (3 to 1 ratio). A normal nutrient solution was used during the first two weeks after transplanting the plantlets in the greenhouse. After the first two weeks, 25 mM of salt (NaCl) was added to the nutrient solution, until the plants were harvested. Seed-related parameters were then measured.

### Drought Screen

[0858] Plants are grown in potting soil under normal conditions until they approach the heading stage. They are then transferred to a “dry” section where irrigation is withheld. Humidity probes are inserted in randomly chosen pots to monitor the soil water content (SWC). When SWC goes below certain thresholds, the plants are automatically re-watered continuously until a normal level is reached again. The plants are then re-transferred again to normal conditions. The rest of the cultivation (plant maturation, seed harvest) is the same as for plants not grown under abiotic stress conditions. Seed-related parameters are then measured An alternative method to impose water stress on the transgenic plants is by treatment with water containing an osmolyte such as polyethylene glycol (PEG) at specific water potential.

[0859] Since PEG may be toxic, the plants are given only a short-term exposure and then normal watering is resumed.

### Reduced Nutrient (Nitrogen) Availability Screen

[0860] The rice plants are grown in potting soil under normal conditions except for the nutrient solution. The pots are watered from transplantation to maturation with a specific nutrient solution containing reduced N nitrogen (N) content, usually between 7 to 8 times less. The rest of the cultivation (plant maturation, seed harvest) is the same as for plants not grown under abiotic stress. Seed-related parameters are then measured

### Statistical Analysis: F-Test

[0861] A two factor ANOVA (analysis of variants) was used as a statistical model for the overall evaluation of plant phenotypic characteristics. An F-test was carried out on all the parameters measured of all the plants of all the events transformed with the gene of the present invention. The F-test was carried out to check for an effect of the gene over all the transformation events and for an overall effect of the gene, also known as a global gene effect. The threshold for significance for a true global gene effect was set at a 5% probability level for the F-test. A significant F-test value points to a gene effect, meaning that it is not only the presence or position of the gene that is causing the differences in phenotype.

### Biomass-Related Parameter Measurement

[0862] From the stage of sowing until the stage of maturity the plants were passed several times through a digital imaging cabinet. At each time point digital images (2048×1536 pixels, 16 million colours) were taken of each plant from at least 6 different angles.

[0863] The plant aboveground area (or leafy biomass) was determined by counting the total number of pixels on the digital images from aboveground plant parts discriminated from the background. This value was averaged for the pictures taken on the same time point from the different angles and was converted to a physical surface value expressed in square mm by calibration. Experiments show that the aboveground plant area measured this way correlates with the biomass of plant parts above ground. The above ground area is the time point at which the plant had reached its maximal leafy biomass. The early vigour is the plant (seedling) aboveground area three weeks post-germination.

### Seed-Related Parameter Measurements

[0864] The mature primary panicles were harvested, counted, bagged, barcode-labeled and then dried for three days in an oven at 37° C. The panicles were then threshed and all the seeds were collected and counted. The filled husks were separated from the empty ones using an air-blowing device. The empty husks were discarded and the remaining fraction was counted again. The filled husks were weighed on an analytical balance. The number of filled seeds was determined by counting the number of filled husks that remained after the separation step. The total seed yield was measured by weighing all filled husks harvested from a plant. Total seed number per plant was measured by counting the number of husks harvested from a plant. Thousand kernel weight (TKW) is extrapolated from the number of filled seeds counted and their total weight. The harvest index (HI) in the present invention is defined as the ratio between the total seed yield and the above ground area (mm²), multiplied by a factor 10⁶. The total number of flowers per panicle as defined in the present invention is the ratio between the total number of seeds and the number of mature primary panicles. The seed fill rate as defined in the present invention is the proportion (expressed as a %) of the number of filled seeds over the total number of seeds (or florets).

### Example 11

### Results of the Evaluation of AtSYT1 Transgenic Rice Plants under Abiotic Stress (Salt Stress)

[0865] The results of the evaluation of AtSYT1 transgenic rice plants submitted to salt stress are presented in Table B. The percentage difference between the transgenics and the corresponding nullizygotes is also shown, with a P value from the F test below 0.05.

[0866] Aboveground biomass, early vigour, total seed yield, number of filled seeds, seed fill rate, TKW and harvest index are significantly increased in the AtSYT1 transgenic plants compared to the control plants (in this case, the nullizygotes), under abiotic stress.

TABLE B
Results of the evaluation of AtSYT1 transgenic
rice plants under abiotic stress.

| Trait | % Difference |
|---|---|
| Aboveground biomass | 19 |
| Early vigour | 18 |
| Total seed yield | 30 |
| Nbr of filled seeds | 18 |
| Fill rate | 15 |
| TKW | 10 |
| Harvest index | 16 |

### Example 12

### Identification of Sequences Related to SEQ ID NO: 154 and SEQ ID NO: 155

[0867] Sequences (full length cDNA, ESTs or genomic) related to SEQ ID NO: 154 and SEQ ID NO: 155 were identified amongst those maintained in the Entrez Nucleotides database at the National Center for Biotechnology Information (NCBI) using database sequence search tools, such as the Basic Local Alignment Tool (BLAST) (Altschul et al. (1990) J. Mol. Biol. 215:403-410; and Altschul et al. (1997) Nucleic Acids Res. 25:3389-3402). The program is used to find regions of local similarity between sequences by comparing nucleic acid or polypeptide sequences to sequence databases and by calculating the statistical significance of matches. The polypeptide encoded by SEQ ID NO: 154 was used for the TBLASTN algorithm, with default settings and the filter to ignore low complexity sequences set off. The output of the analysis was viewed by pairwise comparison, and ranked according to the probability score (E-value), where the score reflects the probability that a particular alignment occurs by chance (the lower the E-value, the more significant the hit). In addition to E-values, comparisons were also scored by percentage identity. Percentage identity refers to the number of identical nucleotides (or amino acids) between the two compared nucleic acid (or polypeptide) sequences over a particular length. In some instances, the default parameters may be adjusted to modify the stringency of the search.

[0868] In addition to the publicly available nucleic acid sequences available at NCBI, proprietary sequence databases are also searched following the same procedure as described herein above.

[0869] Table C provides a list of nucleic acid sequences related to the nucleic acid sequence as represented by SEQ ID NO: 154.

TABLE C
Nucleic acid sequences related to the nucleic acid sequence (SEQ ID NO: 154)
useful in the methods of the present invention, and the corresponding deduced polypeptides.

| | | Nucleic | | Database | |
|---|---|---|---|---|---|
| | Source | acid SEQ | Polypeptide | accession | |
| Name | organism | ID NO: | SEQ ID NO: | number | Status |
| Chlre_cpFBPase | Chlamydomonas | 154 | 155 | Derived from | Full length |
| | reinhardtii | | | AW721488 | |
| | | | | BQ811919 | |
| | | | | CF555540 | |
| Bigna_cpFBPase | Bigelowiella | 156 | 157 | AY267678 | Full length |
| | natans | | | | |
| Aqufo_cpFBPase | Aquilegia | 158 | 159 | DR944021 | Full length |
| | formosa × | | | DT749545 | |
| | Aquilegia | | | | |
| | pubescens | | | | |
| Arath_cpFBPase | Arabidopsis | 160 | 161 | X58148 | Full length |
| | thaliana | | | | |
| Brana_cpFBPase | Brassica napus | 162 | 163 | AF081796 | Full length |
| Cyame_cpFBPase | Cyanidioschyzon | 164 | 165 | CMO245C* | Full length |
| | merolae | | | | |
| Glyma_cpFBPase | Glycine max | 166 | 167 | L34841 | Full length |
| Lyces_cpFBPase | Lycopersicon | 168 | 169 | BT014319 | Full length |
| | esculentum | | | | |
| Medtr_cpFBPase | Medicago | 170 | 171 | BI310407 | Full length |
| | truncatula | | | BI265103 | |
| | | | | CO516140 | |
| Nicta_cpFBPase | Nicotiana | 172 | 173 | DW000613 | Full length |
| | tabacum | | | EB680028 | |
| Orysa_cpFBPase | Oryza sativa | 174 | 175 | AB007194 | Full length |
| Ostlu_cpFBPase | Ostreococcus | 176 | 177 | jgi\|Ost9901_3\|92356\| | Full length |
| | lucimarinus | | | ost_03_002_042** | |
| Ostta_cpFBPase | Ostreococcus | 178 | 179 | CR954203 | Full length |
| | tauri | | | | |
| Phatr_cpFBPase | Phaeodactylum | 180 | 181 | scaffold_27: | Full length |
| | tricornutum | | | 145102-145476** | |
| Pissa_cpFBPase | Pisum sativa | 182 | 183 | L34806 | Full length |
| Pontr_cpFBPase | Poncirus trifoliata | 184 | 185 | CV705787 | Full length |
| | | | | CV705786 | |
| Poptr_cpFBPase | Populus | 186 | 187 | CV241715 | Full length |
| | tremuloides | | | DT474034 | |
| Soltu_cpFBPase | Solanum | 188 | 189 | AF1340451 | Full length |
| | tuberosum | | | | |
| Spiol_cpFBPase | Spinacia | 190 | 191 | L76555 | Full length |
| | oleracea | | | | |
| Triae_cpFBPase | Triticum | 192 | 193 | X07780 | Full length |
| | aestivum | | | | |
| Zeama_cpFBPase | Zea mays | 194 | 195 | DR792524.1 | Full length |
| | | | | DT645374.1 | |
| Phypa_cpFBPase | Physicomitrella | 196 | 197 | BY991118.1 | Full length |
| | patens | | | BJ168552.1 + | |
| | | | | proprietary | |
| Galsu_cpFBPase | Galderia | 198 | 199 | AJ302644 | Partial |
| | sulphuraria | | | | |
| Marpo_cpFBPase | Marchantia | 200 | 201 | BJ862191 | Partial |
| | polymorpha | | | | |
| Tagpa_cpFBPase | Tagetes patula | 202 | 203 | Contig | Partial |
| | | | | CON_01b- | |
| | | | | cs_scarletade- | |
| | | | | 4-e3.b1 | |
| | | | | proprietary | |
| Linus_cpFBPase | 204 | 204 | 205 | contig6298 | Partial |
| | | | | proprietary | |

*Cyanidioschyzon merolae database at the Department of Biological Science, University of Tokyo
**Ostreococcus lucimarinus and Phaeodactylum tricornutum databases at the DOE Joint Genome Institute, US Department of Energy

### Example 13

### Alignment of Relevant Polypeptide Sequences

[0870] AlignX from the Vector NTI (Invitrogen) is based on the popular Clustal algorithm of progressive alignment (Thompson et al. (1997) Nucleic Acids Res 25:4876-4882; Chenna et al. (2003). Nucleic Acids Res 31:3497-3500). A phylogenetic tree can be constructed using a neighbour-joining clustering algorithm. Default values are for the gap open penalty of 10, for the gap extension penalty of 0.1 and the selected weight matrix is Blosum 62 (if polypeptides are aligned).

[0871] The result of the multiple sequence alignment using polypeptides relevant in identifying the ones useful in performing the methods of the invention is shown in FIG. 12 of the present application. Chloroplastic FBPase polypeptides (cpFBPase) differ from cytoplasmic FBPase (cyFBPase) polypeptides by the presence of a transit peptide at their N-terminus for plastidic (chloroplastic) subcellular targeting (boxed in the figure). In addition, the former contain an insertion of amino acids (also boxed, and named redox regulatory insertion) comprising at least two cysteine residues necessary for disulphide bridge formation (i.e. redox regulation). The conserved cysteines are named after their position in the mature pea (Pisum sativa) cpFBPase polypeptide, i.e. Cys153, Cys173 and Cys178. Cys153 and Cys173 usually are the two partners involved in disulphide bridge formation (Chiadmi et al. (1999) EMBO J 18(23): 6809-6815). The active site motif of cpFBPase as defined in the Prosite database is PS00124 and corresponds to the following amino acid sequence: [AG]-[RK]-[LI]-X(1,2)-[LIV]-[FY]-E-X(2)-P-[LIVM]-[GSA], wherein [RK] is the active site that binds and X any amino acid. The predicted active site motif and predicted active site itself (comprised within the motif) have also been boxed in FIG. 12. Also identified in FIG. 12 are amino acid residues Asn237, Tyr269, Tyr289 and Arg268 which bind the 6-phosphate of fructose-1,6-bisphosphate, and Lys299 which binds the fructose (Chiadmi et al. (1999) EMBO J 18(23): 6809-6815). These latter are also numbered after their position in the mature pea (Pisum sativa) cpFBPase polypeptide.

### Example 14

### Calculation of Global Percentage Identity between Polypeptide Sequences Useful in Performing the Methods of the Invention

[0872] Global percentages of similarity and identity between full length polypeptide sequences useful in performing the methods of the invention were determined using one of the methods available in the art, the MatGAT (Matrix Global Alignment Tool) software (BMC Bioinformatics. 2003 4:29. MatGAT: an application that generates similarity/identity matrices using protein or DNA sequences. Campanella J J, Bitincka L, Smalley J; software hosted by Ledion Bitincka). MatGAT software generates similarity/identity matrices for DNA or protein sequences without needing pre-alignment of the data. The program performs a series of pair-wise alignments using the Myers and Miller global alignment algorithm (with a gap opening penalty of 12, and a gap extension penalty of 2), calculates similarity and identity using for example Blosum 62 (for polypeptides), and then places the results in a distance matrix. Sequence similarity is shown in the bottom half of the dividing line and sequence identity is shown in the top half of the diagonal dividing line.

Parameters used in the comparison were:
[0873] Scoring matrix: Blosum62
[0874] First Gap: 12
[0875] Extending gap: 2

[0876] Results of the software analysis are shown in Table D for the global similarity and identity over the full length of the polypeptide sequences (excluding the partial polypeptide sequences). Percentage identity is given above the diagonal and percentage similarity is given below the diagonal.

[0877] The percentage identity between the polypeptide sequences useful in performing the methods of the invention can be as low as 40% amino acid identity compared to SEQ ID NO: 155.

TABLE D
MatGAT results for global similarity and identity over the full length of the polypeptide sequences.

| | 1 | 2 | 3 | 4 | 5 | 6 | 7 | 8 | 9 | 10 | 11 | 12 | 13 | 14 | 15 | 16 | 17 | 18 | 19 | 20 | 21 | 22 |
|---|---|---|---|---|---|---|---|---|---|---|---|---|---|---|---|---|---|---|---|---|---|---|
| 1. Arath_cpFBPase | | 79 | 67 | 76 | 51 | 62 | 42 | 40 | 79 | 74 | 74 | 79 | 92 | 60 | 80 | 79 | 80 | 58 | 42 | 39 | 16 | 35 |
| 2. Soltu_cpFBPase | 87 | | 69 | 77 | 51 | 62 | 43 | 41 | 79 | 76 | 74 | 82 | 80 | 58 | 82 | 94 | 97 | 58 | 42 | 40 | 15 | 36 |
| 3. Phymi_cpFBPase | 81 | 81 | | 69 | 50 | 62 | 42 | 41 | 67 | 70 | 68 | 69 | 68 | 60 | 68 | 68 | 69 | 60 | 41 | 38 | 13 | 34 |
| 4. Orysa_cpFBPase | 85 | 86 | 81 | | 52 | 65 | 43 | 41 | 76 | 85 | 88 | 78 | 78 | 59 | 77 | 77 | 78 | 57 | 41 | 39 | 16 | 35 |
| 5. Bigna_cpFBPase | 68 | 68 | 67 | 69 | | 52 | 49 | 42 | 51 | 51 | 51 | 51 | 51 | 52 | 52 | 52 | 50 | 51 | 43 | 40 | 16 | 36 |
| 6. Chlre_cpFBPase | 75 | 73 | 76 | 76 | 66 | | 45 | 41 | 61 | 63 | 63 | 63 | 64 | 63 | 62 | 62 | 63 | 61 | 42 | 40 | 17 | 33 |
| 7. Phatr_cpFBPase | 61 | 60 | 61 | 61 | 64 | 61 | | 42 | 44 | 45 | 44 | 44 | 42 | 47 | 43 | 42 | 43 | 48 | 40 | 35 | 15 | 32 |
| 8. Cyame_cpFBPase | 59 | 61 | 59 | 60 | 61 | 60 | 59 | | 41 | 41 | 41 | 41 | 40 | 41 | 42 | 41 | 42 | 41 | 36 | 32 | 15 | 34 |
| 9. Pissa_cpFBPase | 86 | 89 | 80 | 84 | 68 | 72 | 60 | 59 | | 73 | 75 | 83 | 79 | 59 | 81 | 80 | 80 | 56 | 41 | 39 | 15 | 35 |
| 10. Triae_cpFBPase | 83 | 85 | 81 | 90 | 67 | 74 | 60 | 61 | 83 | | 81 | 75 | 75 | 61 | 74 | 74 | 75 | 60 | 41 | 39 | 15 | 35 |
| 11. Zeama_cpFBPase | 84 | 84 | 81 | 92 | 68 | 76 | 61 | 60 | 84 | 89 | | 75 | 76 | 59 | 75 | 75 | 76 | 57 | 40 | 38 | 15 | 33 |
| 12. Pontr_cpFBPase | 88 | 90 | 81 | 84 | 67 | 74 | 62 | 61 | 92 | 84 | 84 | | 80 | 59 | 85 | 82 | 82 | 56 | 41 | 40 | 16 | 35 |
| 13. Brana_cpFBPase | 96 | 87 | 81 | 86 | 67 | 76 | 60 | 60 | 87 | 85 | 85 | 87 | | 59 | 81 | 80 | 80 | 57 | 42 | 39 | 15 | 36 |
| 14. Ostta_cpFBPase | 72 | 71 | 72 | 73 | 69 | 73 | 60 | 57 | 72 | 71 | 72 | 71 | 71 | | 58 | 58 | 59 | 85 | 45 | 44 | 15 | 38 |
| 15. Poptr_cpFBPase | 89 | 89 | 82 | 85 | 67 | 73 | 63 | 60 | 89 | 84 | 84 | 91 | 88 | 71 | | 82 | 82 | 56 | 41 | 39 | 13 | 35 |
| 16. Nicta_cpFBPase | 87 | 98 | 81 | 85 | 68 | 73 | 59 | 61 | 88 | 84 | 86 | 89 | 87 | 70 | 89 | | 93 | 57 | 41 | 40 | 15 | 36 |
| 17. Lyces_cpFBPase | 86 | 98 | 80 | 86 | 67 | 73 | 61 | 60 | 89 | 85 | 85 | 89 | 86 | 72 | 89 | 96 | | 58 | 42 | 40 | 16 | 36 |
| 18. Ostlu_cpFBPase | 72 | 70 | 72 | 73 | 66 | 72 | 60 | 58 | 72 | 72 | 71 | 70 | 73 | 91 | 71 | 70 | 72 | | 44 | 43 | 16 | 37 |
| 19. Arath_cyFBPase | 56 | 57 | 56 | 56 | 58 | 57 | 53 | 50 | 56 | 56 | 56 | 55 | 57 | 60 | 55 | 56 | 57 | 61 | | 48 | 16 | 42 |
| 20. Euggr_cyFBPase | 57 | 57 | 57 | 59 | 57 | 58 | 57 | 51 | 57 | 58 | 57 | 56 | 58 | 63 | 58 | 56 | 58 | 61 | 63 | | 15 | 35 |
| 21. Synec_FBPase | 31 | 30 | 30 | 31 | 31 | 34 | 31 | 30 | 31 | 28 | 30 | 30 | 31 | 29 | 29 | 29 | 31 | 32 | 32 | 32 | | 16 |
| SBPase | | | | | | | | | | | | | | | | | | | | | | |
| 22. Synec_FBPaseII | 52 | 53 | 53 | 53 | 52 | 51 | 47 | 45 | 52 | 52 | 51 | 52 | 52 | 57 | 52 | 53 | 54 | 57 | 61 | 53 | 33 | |

### Example 15

### Identification of Domains Comprised in Polypeptide Sequences useful in Performing the Methods of the Invention

[0878] The Integrated Resource of Protein Families, Domains and Sites (InterPro) database is an integrated interface for the commonly used signature databases for text- and sequence-based searches. The InterPro database combines these databases, which use different methodologies and varying degrees of biological information about well-characterized proteins to derive protein signatures. Collaborating databases include SWISS-PROT, PROSITE, TrEMBL, PRINTS, ProDom and Pfam, Smart and TIGRFAMs. Interpro is hosted at the European Bioinformatics Institute in the United Kingdom.

[0879] The results of the InterPro scan of the polypeptide sequence as represented by SEQ ID NO: 155 are presented in Table E.

TABLE E
InterPro scan results of the polypeptide sequence
as represented by SEQ ID NO: 155

| | Accession | |
|---|---|---|
| Database | number | Accession name |
| InterPro | IPR000146 | Inositol phosphatase/ |
| | | fructose-1,6-bisphosphatase |
| ProDom | PD001491 | Inositol phosphatase/ |
| | | fructose-1,6-bisphosphatase |
| PRINTS | PR00115 | FBPHPHTASE |
| PIR | PIRSF000904 | Fructose-1,6-bisphosphatase/ |
| superfamily | | sedoheptulose-1,7- |
| | | bisphosphatase |
| PANTHER | PTHR11556 | FRUCTOSE-1,6- |
| | | BISPHOSPHATASE-RELATED |
| Pfam | PF00316 | FBPase |
| PROFILE | PS00124 | FBPASE active site |
| PROSITE | PS00124 | FBPASE active site |

### Example 16

### Topology Prediction of the Polypeptide Sequences useful in Performing the Methods of the Invention (Subcellular Localization, Transmembrane . . . )

[0880] TargetP 1.1 predicts the subcellular location of eukaryotic proteins. The location assignment is based on the predicted presence of any of the N-terminal pre-sequences: chloroplast transit peptide (cTP), mitochondrial targeting peptide (mTP) or secretory pathway signal peptide (SP). Scores on which the final prediction is based are not really probabilities, and they do not necessarily add to one. However, the location with the highest score is the most likely according to TargetP, and the relationship between the scores (the reliability class) may be an indication of how certain the prediction is. The reliability class (RC) ranges from 1 to 5, where 1 indicates the strongest prediction. TargetP is maintained at the server of the Technical University of Denmark.

[0881] For the sequences predicted to contain an N-terminal presequence a potential cleavage site can also be predicted.

[0882] A number of parameters were selected, such as organism group (non-plant or plant), cutoff sets (none, predefined set of cutoffs, or user-specified set of cutoffs), and the calculation of prediction of cleavage sites (yes or no).

[0883] The results of TargetP 1.1 analysis of the polypeptide sequence as represented by SEQ ID NO: 155 are presented Table F. The “plant” organism group has been selected, no cutoffs defined, and the predicted length of the transit peptide requested. The subcellular localization of the polypeptide sequence as represented by SEQ ID NO: 155 is the chloroplast, and the predicted length of the transit peptide is of 56 amino acids starting from the N-terminus (not as reliable as the prediction of the subcellular localization itself, may vary in length of a few amino acids). The mature pea cpFBPase has a transit peptide of 53 amino acids in length. When aligning the pea cpFBPase and the cpFBPase of SEQ ID NO: 155, it is possible to deduce the length of the transit peptide in the latter, also of 53 amino acids.

TABLE F
TargetP 1.1 analysis of the polypeptide sequence
as represented by SEQ ID NO: 155

| | |
|---|---|
| Length (AA) | 415 |
| Chloroplastic transit peptide | 0.832 |
| Mitochondrial transit peptide | 0.106 |
| Secretory pathway signal peptide | 0.003 |
| Other subcellular targeting | 0.065 |
| Predicted Location | Chloroplastic |
| Reliability class | 2 |
| Predicted transit peptide length | 56 |

[0884] Many other algorithms can be used to perform such analyses, including:
[0885] ChloroP 1.1 hosted on the server of the Technical University of Denmark;
[0886] Protein Prowler Subcellular Localisation Predictor version 1.2 hosted on the server of the Institute for Molecular Bioscience, University of Queensland, Brisbane, Australia;
[0887] PENCE Proteome Analyst PA-GOSUB 2.5 hosted on the server of the University of Alberta, Edmonton, Alberta, Canada;

### Example 17

### Assay Related to the Polypeptide Sequences useful in Performing the Methods of the Invention

[0888] Polypeptide sequence as represented by SEQ ID NO: 155 is an enzyme with as Enzyme Commission (EC; classification of enzymes by the reactions they catalyse) number EC 3.1.3.11 for fructose-bisphosphatase (also called D-fructose-1,6-bisphosphate 1-phosphohydrolase). The functional assay maybe an assay for FBPase activity based on a colorimetric Pi assay, as described by Huppe and Buchanan (1989) in Naturforsch. 44c: 487-494. Other methods to assay the enzymatic activity are described by Alscher-Herman (1982) in Plant Physiol 70: 728-734.

### Example 18

### Cloning of Nucleic Acid Sequence as Represented by SEQ ID NO: 154

[0889] Unless otherwise stated, recombinant DNA techniques are performed according to standard protocols described in (Sambrook (2001) Molecular Cloning: a laboratory manual, 3rd Edition Cold Spring Harbor Laboratory Press, CSH, New York) or in Volumes 1 and 2 of Ausubel et al. (1994), Current Protocols in Molecular Biology, Current Protocols. Standard materials and methods for plant molecular work are described in Plant Molecular Biology Labfax (1993) by R.D.D. Croy, published by BIOS Scientific Publications Ltd (UK) and Blackwell Scientific Publications (UK).

[0890] The nucleic acid sequence used in the methods of the invention was amplified by PCR using as template a Chlamydomonas reinhardtii CC-1690 cDNA library (“Core Library”) (in Lambda ZAP II vector from Stratagene) purchased at the Chlamy Center (formerly the Chlamydomonas Genetics Center) at Duke University, North Carolina, USA. PCR was performed using Hifi Taq DNA polymerase in standard conditions, using 200 ng of template in a 50 μl PCR mix. The primers used were
[0891] prm08448 SEQ ID NO: 206; sense, AttB1 site in lower case: 5′-ggggacaagtttgtacaaaaaagcaggcttaaacaatggccgccaccatg-3′; and
[0892] prm08449 (SEQ ID NO: 207; reverse, complementary, AttB2 site in lower case: 5′-ggggaccactttgtacaagaaagctgggtagctgcttagtgcttcttggt-3′,
   which include the AttB sites for Gateway recombination. The amplified PCR fragment was purified also using standard methods. The first step of the Gateway procedure, the BP reaction, was then performed, during which the PCR fragment recombines in vivo with the pDONR201 plasmid to produce, according to the Gateway terminology, an “entry clone”, p15972. Plasmid pDONR201 was purchased from Invitrogen, as part of the Gateway® technology.

### Example 19

### Expression Vector Construction using the Nucleic Acid Sequence as Represented by SEQ ID NO: 154

[0893] The entry clone p15972 was subsequently used in an LR reaction with p05050, a destination vector used for Oryza sativa transformation. This vector contains as functional elements within the T-DNA borders: a plant selectable marker; a screenable marker expression cassette; and a Gateway cassette intended for LR in vivo recombination with the nucleic acid sequence of interest already cloned in the entry clone. A rice GOS2 promoter (SEQ ID NO: 208) for constitutive expression (PRO0129) was located upstream of this Gateway cassette.

[0894] After the LR recombination step, the resulting expression vector pGOS2::FBPase (FIG. 13) was transformed into Agrobacterium strain LBA4044 according to methods well known in the art.

### Example 20

### Plant Transformation

### Rice Transformation

[0895] The Agrobacterium containing the expression vector was used to transform Oryza sativa plants. Mature dry seeds of the rice japonica cultivar Nipponbare were dehusked. Sterilization was carried out by incubating for one minute in 70% ethanol, followed by 30 minutes in 0.2% HgCl2, followed by a 6 times 15 minutes wash with sterile distilled water. The sterile seeds were then germinated on a medium containing 2,4-D (callus induction medium). After incubation in the dark for four weeks, embryogenic, scutellum-derived calli were excised and propagated on the same medium. After two weeks, the calli were multiplied or propagated by subculture on the same medium for another 2 weeks. Embryogenic callus pieces were sub-cultured on fresh medium 3 days before co-cultivation (to boost cell division activity).

[0896] Agrobacterium strain LBA4404 containing the expression vector was used for cocultivation. Agrobacterium was inoculated on AB medium with the appropriate antibiotics and cultured for 3 days at 28° C. The bacteria were then collected and suspended in liquid co-cultivation medium to a density (OD600) of about 1. The suspension was then transferred to a Petri dish and the calli immersed in the suspension for 15 minutes. The callus tissues were then blotted dry on a filter paper and transferred to solidified, co-cultivation medium and incubated for 3 days in the dark at 25° C. Co-cultivated calli were grown on 2,4-D-containing medium for 4 weeks in the dark at 28° C. in the presence of a selection agent. During this period, rapidly growing resistant callus islands developed. After transfer of this material to a regeneration medium and incubation in the light, the embryogenic potential was released and shoots developed in the next four to five weeks. Shoots were excised from the calli and incubated for 2 to 3 weeks on an auxin-containing medium from which they were transferred to soil. Hardened shoots were grown under high humidity and short days in a greenhouse.

[0897] Approximately 35 independent T0 rice transformants were generated for one construct. The primary transformants were transferred from a tissue culture chamber to a greenhouse. After a quantitative PCR analysis to verify copy number of the T-DNA insert, only single copy transgenic plants that exhibit tolerance to the selection agent were kept for harvest of T1 seed. Seeds were then harvested three to five months after transplanting. The method yielded single locus transformants at a rate of over 50% (Aldemita and Hodges1996, Chan et al. 1993, Hiei et al. 1994).

### Corn Transformation

[0898] Transformation of maize (Zea mays) is performed with a modification of the method described by Ishida et al. (1996) Nature Biotech 14(6): 745-50. Transformation is genotype-dependent in corn and only specific genotypes are amenable to transformation and regeneration. The inbred line A188 (University of Minnesota) or hybrids with A188 as a parent are good sources of donor material for tansformation, but other genotypes can be used successfully as well. Ears are harvested from corn plant approximately 11 days after pollination (DAP) when the length of the immature embryo is about 1 to 1.2 mm. Immature embryos are cocultivated with Agrobacterium tumefaciens containing the expression vector, and transgenic plants are recovered through organogenesis. Excised embryos are grown on callus induction medium, then maize regeneration medium, containing the selection agent (for example imidazolinone but various selection markers can be used). The Petri plates are incubated in the light at 25° C. for 2-3 weeks, or until shoots develop. The green shoots are transferred from each embryo to maize rooting medium and incubated at 25° C. for 2-3 weeks, until roots develop. The rooted shoots are transplanted to soil in the greenhouse. T1 seeds are produced from plants that exhibit tolerance to the selection agent and that contain a single copy of the T-DNA insert.

### Wheat Transformation

[0899] Transformation of wheat is performed with the method described by Ishida et al. (1996) Nature Biotech 14(6): 745-50. The cultivar Bobwhite (available from CIMMYT, Mexico) is commonly used in transformation. Immature embryos are co-cultivated with Agrobacterium tumefaciens containing the expression vector, and transgenic plants are recovered through organogenesis. After incubation with Agrobacterium, the embryos are grown in vitro on callus induction medium, then regeneration medium, containing the selection agent (for example imidazolinone but various selection markers can be used). The Petri plates are incubated in the light at 25° C. for 2-3 weeks, or until shoots develop. The green shoots are transferred from each embryo to rooting medium and incubated at 25° C. for 2-3 weeks, until roots develop. The rooted shoots are transplanted to soil in the greenhouse. T1 seeds are produced from plants that exhibit tolerance to the selection agent and that contain a single copy of the T-DNA insert.

### Soybean Transformation

[0900] Soybean is transformed according to a modification of the method described in the Texas A&M patent U.S. Pat. No. 5,164,310. Several commercial soybean varieties are amenable to transformation by this method. The cultivar Jack (available from the Illinois Seed foundation) is commonly used for transformation. Soybean seeds are sterilised for in vitro sowing. The hypocotyl, the radicle and one cotyledon are excised from seven-day old young seedlings. The epicotyl and the remaining cotyledon are further grown to develop axillary nodes. These axillary nodes are excised and incubated with Agrobacterium tumefaciens containing the expression vector. After the cocultivation treatment, the explants are washed and transferred to selection media. Regenerated shoots are excised and placed on a shoot elongation medium. Shoots no longer than 1 cm are placed on rooting medium until roots develop. The rooted shoots are transplanted to soil in the greenhouse. T1 seeds are produced from plants that exhibit tolerance to the selection agent and that contain a single copy of the T-DNA insert.

### Rapeseed/Canola Transformation

[0901] Cotyledonary petioles and hypocotyls of 5-6 day old young seedling are used as explants for tissue culture and transformed according to Babic et al. (1998, Plant Cell Rep 17: 183-188). The commercial cultivar Westar (Agriculture Canada) is the standard variety used for transformation, but other varieties can also be used. Canola seeds are surface-sterilized for in vitro sowing. The cotyledon petiole explants with the cotyledon attached are excised from the in vitro seedlings, and inoculated with Agrobacterium (containing the expression vector) by dipping the cut end of the petiole explant into the bacterial suspension. The explants are then cultured for 2 days on MSBAP-3 medium containing 3 mg/l BAP, 3% sucrose, 0.7% Phytagar at 23° C., 16 hr light. After two days of co-cultivation with Agrobacterium, the petiole explants are transferred to MSBAP-3 medium containing 3 mg/l BAP, cefotaxime, carbenicillin, or timentin (300 mg/l) for 7 days, and then cultured on MSBAP-3 medium with cefotaxime, carbenicillin, or timentin and selection agent until shoot regeneration. When the shoots are 5-10 mm in length, they are cut and transferred to shoot elongation medium (MSBAP-0.5, containing 0.5 mg/l BAP). Shoots of about 2 cm in length are transferred to the rooting medium (MS0) for root induction. The rooted shoots are transplanted to soil in the greenhouse. T1 seeds are produced from plants that exhibit tolerance to the selection agent and that contain a single copy of the T-DNA insert.

### Alfalfa Transformation

[0902] A regenerating clone of alfalfa (Medicago sativa) is transformed using the method of (McKersie et al., 1999 Plant Physiol 119: 839-847). Regeneration and transformation of alfalfa is genotype dependent and therefore a regenerating plant is required. Methods to obtain regenerating plants have been described. For example, these can be selected from the cultivar Rangelander (Agriculture Canada) or any other commercial alfalfa variety as described by Brown D C W and A Atanassov (1985. Plant Cell Tissue Organ Culture 4: 111-112). Alternatively, the RA3 variety (University of Wisconsin) has been selected for use in tissue culture (Walker et al., 1978 μm J Bot 65:654-659). Petiole explants are cocultivated with an overnight culture of Agrobacterium tumefaciens C58C1 pMP90 (McKersie et al., 1999 Plant Physiol 119: 839-847) or LBA4404 containing the expression vector. The explants are cocultivated for 3 d in the dark on SH induction medium containing 288 mg/L Pro, 53 mg/L thioproline, 4.35 g/L K2SO4, and 100 μm acetosyringinone. The explants are washed in half-strength Murashige-Skoog medium (Murashige and Skoog, 1962) and plated on the same SH induction medium without acetosyringinone but with a suitable selection agent and suitable antibiotic to inhibit Agrobacterium growth. After several weeks, somatic embryos are transferred to BOi2Y development medium containing no growth regulators, no antibiotics, and 50 g/L sucrose. Somatic embryos are subsequently germinated on half-strength Murashige-Skoog medium. Rooted seedlings were transplanted into pots and grown in a greenhouse. T1 seeds are produced from plants that exhibit tolerance to the selection agent and that contain a single copy of the T-DNA insert.

### Example 21

### Phenotypic Evaluation Procedure

### 21.1 Evaluation Setup

[0903] Approximately 35 independent T0 rice transformants were generated. The primary transformants were transferred from a tissue culture chamber to a greenhouse for growing and harvest of T1 seed. Eight events, of which the T1 progeny segregated 3:1 for presence/absence of the transgene, were retained. For each of these events, approximately 10 T1 seedlings containing the transgene (hetero- and homo-zygotes) and approximately 10 T1 seedlings lacking the transgene (nullizygotes) were selected by monitoring visual marker expression. The transgenic plants and the corresponding nullizygotes were grown side-by-side at random positions. Greenhouse conditions were of shorts days (12 hours light), 28° C. in the light and 22° C. in the dark, and a relative humidity of 70%.

### Drought Screen

[0904] Plants from T2 seeds are grown in potting soil under normal conditions until they approached the heading stage. They are then transferred to a “dry” section where irrigation is withheld. Humidity probes are inserted in randomly chosen pots to monitor the soil water content (SWC). When SWC goes below certain thresholds, the plants are automatically re-watered continuously until a normal level was reached again. The plants are then re-transferred again to normal conditions. The rest of the cultivation (plant maturation, seed harvest) is the same as for plants not grown under abiotic stress conditions. Growth and yield parameters are recorded as detailed for growth under normal conditions.

### Nitrogen use Efficiency Screen

[0905] Rice plants from T2 seeds are grown in potting soil under normal conditions except for the nutrient solution. The pots are watered from transplantation to maturation with a specific nutrient solution containing reduced N nitrogen (N) content, usually between 7 to 8 times less. The rest of the cultivation (plant maturation, seed harvest) is the same as for plants not grown under abiotic stress. Growth and yield parameters are recorded as detailed for growth under normal conditions.

[0906] Four T1 events were further evaluated in the T2 generation following the same evaluation procedure as for the T1 generation but with more individuals per event. From the stage of sowing until the stage of maturity the plants were passed several times through a digital imaging cabinet. At each time point digital images (2048×1536 pixels, 16 million colours) were taken of each plant from at least 6 different angles.

### 21.2 Statistical Analysis: F-Test

[0907] A two factor ANOVA (analysis of variants) was used as a statistical model for the overall evaluation of plant phenotypic characteristics. An F-test was carried out on all the parameters measured of all the plants of all the events transformed with the gene of the present invention. The F-test was carried out to check for an effect of the gene over all the transformation events and to verify for an overall effect of the gene, also known as a global gene effect. The threshold for significance for a true global gene effect was set at a 5% probability level for the F-test. A significant F-test value points to a gene effect, meaning that it is not only the mere presence or position of the gene that is causing the differences in phenotype.

[0908] 21.3 Parameters Measured

### Biomass-Related Parameter Measurement

[0909] From the stage of sowing until the stage of maturity the plants were passed several times through a digital imaging cabinet. At each time point digital images (2048×1536 pixels, 16 million colours) were taken of each plant from at least 6 different angles.

[0910] The plant aboveground area (or leafy biomass) was determined by counting the total number of pixels on the digital images from aboveground plant parts discriminated from the background. This value was averaged for the pictures taken on the same time point from the different angles and was converted to a physical surface value expressed in square mm by calibration. Experiments show that the aboveground plant area measured this way correlates with the biomass of plant parts above ground. The above ground area is the time point at which the plant had reached its maximal leafy biomass. The early vigour is the plant (seedling) aboveground area three weeks post-germination.

### Seed-Related Parameter Measurements

[0911] The mature primary panicles were harvested, counted, bagged, barcode-labeled and then dried for three days in an oven at 37° C. The panicles were then threshed and all the seeds were collected and counted. The filled husks were separated from the empty ones using an air-blowing device. The empty husks were discarded and the remaining fraction was counted again. The filled husks were weighed on an analytical balance. The number of filled seeds was determined by counting the number of filled husks that remained after the separation step. The total seed yield was measured by weighing all filled husks harvested from a plant. Total seed number per plant was measured by counting the number of husks harvested from a plant. Thousand kernel weight (TKW) is extrapolated from the number of filled seeds counted and their total weight. The harvest index (HI) in the present invention is defined as the ratio between the total seed yield and the above ground area (mm²), multiplied by a factor 10⁶. The total number of flowers per panicle as defined in the present invention is the ratio between the total number of seeds and the number of mature primary panicles. The seed fill rate as defined in the present invention is the proportion (expressed as a %) of the number of filled seeds over the total number of seeds (or florets).

### Example 22

### Results of the Phenotypic Evaluation of the Transgenic Plants

[0912] The results of the evaluation of transgenic rice plants expressing the nucleic acid sequence useful in performing the methods of the invention are presented in Table G. The percentage difference between the transgenics and the corresponding nullizygotes is also shown, with a P value from the F test below 0.05.

[0913] Total seed yield, number of filled seeds, seed fill rate and harvest index are significantly increased in the transgenic plants expressing the nucleic acid sequence useful in performing the methods of the invention, compared to the control plants (in this case, the nullizygotes).

TABLE G
Results of the evaluation of transgenic rice plants expressing the nucleic
acid sequence useful in performing the methods of the invention.

| | % Increase in | % Increase in |
|---|---|---|
| Trait | T1 generation | T2 generation |
| Total seed yield | 7 | 28 |
| Number of filled seeds | 5 | 28 |
| Fill rate | 6 | 19 |
| Harvest index | 4 | 21 |

### Example 23

### Gene Cloning

[0914] The rice SIK gene was amplified by PCR with primers (SEQ ID NO: 227; sense, start codon in bold, AttB1 site in italic: 5′-ggggacaagtttgtacaaaaaagcaggcttaaacaatgatgggttgcttcactgtc-3′) and (SEQ ID NO: 228; reverse, complementary, AttB2 site in italic: 5′-ggggaccactttgtacaagaaagctgggtatggacaatcaaaaaccctca-3′), which include the AttB sites for Gateway recombination, were used for PCR amplification. PCR was performed using Hifi Taq DNA polymerase under standard conditions. The PCR fragment was purified using standard methods. The first step of the Gateway procedure, the BP reaction, was then performed, during which the PCR fragment recombines in vivo with the pDONR201 plasmid to produce, according to the Gateway terminology, an “entry clone”. Plasmid pDONR201 was purchased from Invitrogen, as part of the Gateway® technology.

### Example 24

### Vector Construction Downregulation

[0915] The entry clone was subsequently used in an LR reaction with a destination vector used for Oryza sativa transformation for the downregulation construct. This vectors contained within the T-DNA borders: a plant selectable marker; a screenable marker expression cassette; and a Gateway cassette intended for LR in vivo recombination so as to integrate the sequence of interest from the entry clone in sense or anti sense orientation. A rice GOS2 promoter (SEQ ID NO: 226) for constitutive expression was located upstream of this Gateway cassette.

[0916] After the LR recombination step, the resulting expression vector (FIG. 16) was transformed into Agrobacterium strain LBA4044 and subsequently to Oryza sativa plants. Transformed rice plants were allowed to grow and were then examined for the parameters described in Example 26.

### Example 25

### Vector Construction Overexpression

[0917] The entry clone was subsequently used in an LR reaction with a destination vector used for plant (Oryza sativa) transformation. This vector contained within the T-DNA borders: a plant selectable marker; a screenable marker expression cassette; and a Gateway cassette intended for LR in vivo recombination with the sequence of interest already cloned in the entry clone. A rice GOS2 promoter for constitutive expression was located upstream of this Gateway cassette.

[0918] After the LR recombination step, the resulting expression vector (FIG. 17) was transformed into Agrobacterium strain LBA4044. Transformed colonies were grown on YEP media and selected by respective antibiotics for two days at 28° C. These Agrobacterium cultures were used for the plant transformation. Transformed rice plants were allowed to grow and were then examined for the parameters described in Example 26.

### Example 26

### Evaluation of Plants Transformed with SIK in Anti Sense Orientation

[0919] Approximately 15 to 20 independent T0 rice transformants were generated. The primary transformants were transferred from a tissue culture chamber to a greenhouse for growing and harvest of T1 seed. Six events for which the T1 progeny segregated 3:1 for presence/absence of the transgene, were retained. For each of these events, approximately 10 T1 seedlings containing the transgene (hetero- and homozygotes) and approximately 10 T1 seedlings lacking the transgene (nullizygotes) were selected by monitoring visual marker expression.

[0920] The selected T1 plants were transferred to a greenhouse. Each plant received a unique barcode label to link unambiguously the phenotyping data to the corresponding plant. The selected T1 plants were grown on soil in 10 cm diameter pots under the following environmental settings: photoperiod=11.5 h, daylight intensity=30,000 lux or more, daytime temperature=28° C., night time temperature=22° C., relative humidity=60-70%. Plants were grown under optimal watering conditions until they approached the heading stage when irrigation was withheld. Humidity probes were inserted in randomly chosen pots to monitor the soil water content (SWC). When SWC dropped below 20%, the plants were automatically re-watered to achieve optimal watering conditions again. Transgenic plants and the corresponding nullizygotes were grown side-by-side at random positions. From the stage of sowing until the stage of maturity the plants were passed several times through a digital imaging cabinet. At each time point digital images (2048×1536 pixels, 16 million colours) were taken of each plant from at least 6 different angles.

### Drought Screen

[0921] Plants from T2 seeds are grown in potting soil under normal conditions until they approached the heading stage. They are then transferred to a “dry” section where irrigation is withheld. Humidity probes are inserted in randomly chosen pots to monitor the soil water content (SWC). When SWC goes below certain thresholds, the plants are automatically re-watered continuously until a normal level was reached again. The plants are then re-transferred again to normal conditions. The rest of the cultivation (plant maturation, seed harvest) is the same as for plants not grown under abiotic stress conditions. Growth and yield parameters are recorded as detailed for growth under normal conditions.

### Nitrogen use Efficiency Screen

[0922] Rice plants from T2 seeds are grown in potting soil under normal conditions except for the nutrient solution. The pots are watered from transplantation to maturation with a specific nutrient solution containing reduced N nitrogen (N) content, usually between 7 to 8 times less. The rest of the cultivation (plant maturation, seed harvest) is the same as for plants not grown under abiotic stress. Growth and yield parameters are recorded as detailed for growth under normal conditions.

[0923] The plant aboveground area (or leafy biomass) was determined by counting the total number of pixels on the digital images from aboveground plant parts discriminated from the background. This value was averaged for the pictures taken on the same time point from the different angles and was converted to a physical surface value expressed in square mm by calibration. Experiments show that the aboveground plant area measured this way correlates with the biomass of plant parts aboveground. The Areamax is the aboveground area at the time point at which the plant had reached its maximal leafy biomass.

[0924] The mature primary panicles were harvested, bagged, barcode-labelled and then dried for three days in the oven at 37° C. The panicles were then threshed and all the seeds collected. The filled husks were separated from the empty ones using an air-blowing device. After separation, both seed lots were then counted using a commercially available counting machine. The empty husks were discarded. The filled husks were weighed on an analytical balance and the cross-sectional area of the seeds was measured using digital imaging. This procedure resulted in the set of the following seed-related parameters:

[0925] The flowers-per-panicle is a parameter estimating the average number of florets per panicle on a plant, derived from the number of total seeds divided by the number of first panicles. The tallest panicle and all the panicles that overlapped with the tallest panicle when aligned vertically, were considered as first panicles and were counted manually. The number of filled seeds was determined by counting the number of filled husks that remained after the separation step. The total seed yield (total seed weight) was measured by weighing all filled husks harvested from a plant. Total seed number per plant was measured by counting the number of husks harvested from a plant and corresponds to the number of florets per plant. These parameters were derived in an automated way from the digital images using image analysis software and were analysed statistically. Individual seed parameters (including width, length, area, weight) were measured using a custom-made device consisting of two main components, a weighing and imaging device, coupled to software for image analysis. The harvest index in the present invention is defined as the ratio between the total seed yield (g) and the above ground area (mm²), multiplied by a factor 106.

[0926] A two factor ANOVA (analyses of variance) corrected for the unbalanced design was used as statistical model for the overall evaluation of plant phenotypic characteristics. An F-test was carried out on all the parameters measured of all the plants of all the events transformed with that gene. The F-test was carried out to check for an effect of the gene over all the transformation events and to verify for an overall effect of the gene, also named herein “global gene effect”. If the value of the F test shows that the data are significant, than it is concluded that there is a “gene” effect, meaning that not only presence or the position of the gene is causing the effect. The threshold for significance for a true global gene effect is set at 5% probability level for the F test.

[0927] To check for an effect of the genes within an event, i.e., for a line-specific effect, a t-test was performed within each event using data sets from the transgenic plants and the corresponding null plants. “Null plants” or “null segregants” or “nullizygotes” are the plants treated in the same way as the transgenic plant, but from which the transgene has segregated. Null plants can also be described as the homozygous negative transformed plants. The threshold for significance for the t-test is set at 10% probability level. The results for some events can be above or below this threshold. This is based on the hypothesis that a gene might only have an effect in certain positions in the genome, and that the occurrence of this position-dependent effect is not uncommon. This kind of gene effect is also named herein a “line effect of the gene”. The p-value was obtained by comparing the t-value to the t-distribution or alternatively, by comparing the F-value to the F-distribution. The p-value then gives the probability that the null hypothesis (i.e., that there is no effect of the transgene) is correct.

### Example 27

### Results

### 1. Thousand Kernel Weight

[0928] The transgenic lines transformed with the downregulation construct gave an overall percentage increase of 3% compared to controls with the best line giving a 10% increase compared to controls.

### 2. Harvest Index

[0929] The transgenic lines transformed with the downregulation construct gave an overall percentage increase of 16% compared to controls with the best line giving a 61% increase compared to controls.

### 3. Fill Rate

[0930] The transgenic lines transformed with the downregulation construct gave an overall percentage increase of 14% compared to controls with the best line giving a 41% increase compared to controls.

### 4. Flowers per Panicle (Number of Flowers per Plant)

[0931] The transgenic lines transformed with the downregulation construct gave an overall percentage decrease of −3% compared to controls with the best line giving a −11% decrease compared to controls. A decrease in the number of flowers may be important for grasses (when used for lawns for example).

[0932] The transgenic lines transformed with the overexpression construct gave an overall percentage increase of 6% compared to controls with the best line giving a 14% increase compared to controls.

### Example 28

### Identification of Sequences Related to SEQ ID NO: 229 and SEQ ID NO: 230

[0933] Sequences (full length cDNA, ESTs or genomic) related to SEQ ID NO: 229 and SEQ ID NO: 230 were identified amongst those maintained in the Entrez Nucleotides database at the National Center for Biotechnology Information (NCBI) using database sequence search tools, such as the Basic Local Alignment Tool (BLAST) (Altschul et al. (1990) J. Mol. Biol. 215:403-410; and Altschul et al. (1997) Nucleic Acids Res. 25:3389-3402). This program was used to find regions of local similarity between sequences by comparing nucleic acid or polypeptide sequences to sequence databases and by calculating the statistical significance of matches. The polypeptide encoded by SEQ ID NO: 229 was used for the TBLASTN algorithm, with default settings and with the filter to ignore low complexity sequences set off. The output of the analysis was viewed by pairwise comparison, and ranked according to the probability score (E-value), where the score reflects the probability that a particular alignment occurs by chance (the lower the E-value, the more significant the hit). In addition to E-values, comparisons were also scored by percentage identity. Percentage identity refers to the number of identical nucleotides (or amino acids) between the two compared nucleic acid (or polypeptide) sequences over a particular length.

[0934] Table H provides a list of nucleic acid sequences related to the nucleic acid sequence as represented by SEQ ID NO: 229.

TABLE H
Nucleic acid and polypeptide sequences related to the nucleic acid sequence of
SEQ ID NO: 229 and SEQ ID NO: 230 which are useful in performing the methods
of the present invention.

| | | Nucleic acid | Poly-peptide | Database accession | |
|---|---|---|---|---|---|
| Name | Source organism | SEQ ID NO: | SEQ ID NO: | number | Status |
| HAT4 | Arabidopsis thaliana | 229 | 230 | AT4G16780 | Full length |
| LD | Arabidopsis thaliana | 231 | 232 | NP_192165.1 | Full length |
| | Oryza sativa | 233 | 234 | Os03g47022 | Full length |
| | Oryza sativa | 235 | 236 | Os03g12860 | Full length |
| HAT22 | Oryza sativa | 237 | 238 | Os10g01470 | Full length |
| HAT14 | Oryza sativa | 239 | 240 | Os08g36220 | Full length |
| | Oryza sativa | 241 | 242 | Os09g27450 | Full length |
| HAT3 | Oryza sativa | 243 | 244 | Os06g04850 | Full length |
| S1HDL2 | Oryza sativa | 245 | 246 | Os06g04870 | Full length |
| HD-ZIP | Oryza sativa | 247 | 248 | Os10g41230 | Full length |
| | Arabidopsis thaliana | 249 | 250 | NP_174025.3 | Full length |
| HAT14 | Arabidopsis thaliana | 251 | 252 | NP_974743.1 | Full length |
| HAT4 | Arabidopsis thaliana | 253 | 254 | NP_193411.1 | Full length |
| HAT1 | Arabidopsis thaliana | 255 | 256 | NP_193476.1 | Full length |
| HAT2 | Arabidopsis thaliana | 257 | 258 | NP_199548.1 | Full length |
| HB-4 | Arabidopsis thaliana | 259 | 260 | NP_182018.1 | Full length |
| HAT3 | Arabidopsis thaliana | 261 | 262 | NP_191598.1 | Full length |
| | Oryza sativa | 263 | 264 | Os04g46350 | Full length |
| | Oryza sativa | 265 | 266 | Os10g23090 | Full length |
| | Oryza sativa | 267 | 268 | Os10g23090 | Full length |
| | Oryza sativa | 269 | 270 | Os03g08960 | Full length |
| | Oryza sativa | 271 | 272 | Os08g37580 | Full length |
| | Oryza sativa | 273 | 274 | Os09g29460 | Full length |
| | Oryza sativa | 275 | 276 | Os10g39720 | Full length |
| | Oryza sativa | 277 | 278 | Os05g09630 | Full length |

### Example 29

### Alignment of Relevant Polypeptide Sequences

[0935] AlignX from the Vector NTI (Invitrogen) is based on the popular Clustal algorithm of progressive alignment (Thompson et al. (1997) Nucleic Acids Res 25:4876-4882; Chenna et al. (2003). Nucleic Acids Res 31:3497-3500). A phylogenetic tree was constructed using a neighbour-joining clustering algorithm (see FIG. 18). Default values are for the gap open penalty of 10, for the gap extension penalty of 0.1 and the selected weight matrix is Blosum 62 (if polypeptides are aligned). The result of the multiple sequence alignment using is shown in FIG. 19.

### Example 30

### Identification of Domains Comprised in Polypeptide Sequences Useful in Performing the Methods of the Invention

[0936] The Integrated Resource of Protein Families, Domains and Sites (InterPro) database is an integrated interface for the commonly used signature databases for text- and sequence-based searches. The InterPro database combines these databases, which use different methodologies and varying degrees of biological information about well-characterized proteins to derive protein signatures. Collaborating databases include SWISS-PROT, PROSITE, TrEMBL, PRINTS, ProDom and Pfam, Smart and TIGRFAMs. Interpro is hosted at the European Bioinformatics Institute in the United Kingdom.

[0937] The results of the InterPro scan of the polypeptide sequence as represented by SEQ ID NO: 230 are presented in Table I.

TABLE I
InterPro scan results of the polypeptide sequence
as represented by SEQ ID NO: 230

| Database | Accession number | Accession name |
|---|---|---|
| InterPro | IPR006712 | HDZIP |
| InterPro | IPR001356 | homeobox |
| InterPro | IPR003106 | HALZ |
| ProDom | PDA0K5J1 | homeobox PPHB4 DNA binding |
| ProDom | PD728753 | DNA binding |
| ProDom | PD064887 | DNA binding |
| PIR superfamily | PIR PS00001 | asn glycosylation motif |
| PIR superfamily | PS00004 | cAMP phosphorylation site |
| PIR superfamily | PS00005 | PKC phosphorylation site |
| PIR superfamily | PS00006 | CK2 phsophorylation site |
| PIR superfamily | PS00008 | myristoylation |
| PIR superfamily | PS00009 | amidation |
| PIR superfamily | PS00027 | homeobox |
| PIR superfamily | PS00029 | leucine zipper |
| Pfam | PF04618 | HDZIP |
| Pfam | PF00046 | homeobox |
| Pfam | PF02183 | HALZ |

### Example 31

### Cloning of Nucleic Acid Sequence Represented by SEQ ID NO: 229

[0938] The Arabidopsis thaliana HAT4-encoding gene was amplified by PCR using as a template an Arabidopsis thaliana cDNA library (Invitrogen, Paisley, UK). After reverse transcription of RNA extracted from seedlings, the cDNAs were cloned into pCMV Sport 6.0. Average insert size of the bank was 1.6 kb and the original number of clones was of the order of 1.67×10⁷ cfu. Original titer was determined to be 3.34×10⁶ cfu/ml after first amplification of 6×1010 cfu/ml. After plasmid extraction, 200 ng of template was used in a 50 μl PCR mix. The primers used were:

Forward

(SEQ ID NO: 283)

ggggacaagtttgtacaaaaaagcaggcttcacaatgatgttcgaga
aagacgatctg
Reverse

(SEQ ID NO: 284)

ggggaccactttgtacaagaaagctgggtttaggacctaggacgaag
agcgt

which include the AttB sites for Gateway recombination. The amplified PCR fragment was purified also using standard methods. The first step of the Gateway procedure, the BP reaction, was then performed, during which the PCR fragment recombined in vivo with the pDONR201 plasmid to produce, according to the Gateway terminology, an “entry clone”. Plasmid pDONR201 was purchased from Invitrogen, as part of the Gateway® technology.

### Example 32

### Expression Vector Construction using the Nucleic Acid Sequence as Represented by SEQ ID NO: 229

[0939] The entry clone was subsequently used in an LR reaction with a destination vector used for Oryza sativa transformation. This vector contains as functional elements within the T-DNA borders: a plant selectable marker; a screenable marker expression cassette; and a Gateway cassette intended for LR in vivo recombination with the nucleic acid sequence of interest already cloned in the entry clone. A rice GOS2 promoter (SEQ ID NO: 282) for constitutive expression was located upstream of this Gateway cassette.

[0940] After the LR recombination step, the resulting expression vector (FIG. 21) was transformed into Agrobacterium strain LBA4044 according to methods well known in the art.

### Example 33

### Plant Transformation

### Rice Transformation

[0941] The Agrobacterium containing the expression vector was used to transform Oryza sativa plants. Mature dry seeds of the rice japonica cultivar Nipponbare were dehusked. Sterilization was carried out by incubating for one minute in 70% ethanol, followed by 30 minutes in 0.2% HgCl2, followed by a 6 times 15 minutes wash with sterile distilled water. The sterile seeds were then germinated on a medium containing 2,4-D (callus induction medium). After incubation in the dark for four weeks, embryogenic, scutellum-derived calli were excised and propagated on the same medium. After two weeks, the calli were multiplied or propagated by subculture on the same medium for another 2 weeks. Embryogenic callus pieces were sub-cultured on fresh medium 3 days before co-cultivation (to boost cell division activity).

[0942] Agrobacterium strain LBA4404 containing the expression vector was used for cocultivation. Agrobacterium was inoculated on AB medium with the appropriate antibiotics and cultured for 3 days at 28° C. The bacteria were then collected and suspended in liquid co-cultivation medium to a density (OD₆₀₀) of about 1. The suspension was then transferred to a Petri dish and the calli immersed in the suspension for 15 minutes. The callus tissues were then blotted dry on a filter paper and transferred to solidified, co-cultivation medium and incubated for 3 days in the dark at 25° C. Co-cultivated calli were grown on 2,4-D-containing medium for 4 weeks in the dark at 28° C. in the presence of a selection agent. During this period, rapidly growing resistant callus islands developed. After transfer of this material to a regeneration medium and incubation in the light, the embryogenic potential was released and shoots developed in the next four to five weeks. Shoots were excised from the calli and incubated for 2 to 3 weeks on an auxin-containing medium from which they were transferred to soil. Hardened shoots were grown under high humidity and short days in a greenhouse.

[0943] Approximately 35 independent T0 rice transformants were generated for one construct. The primary transformants were transferred from a tissue culture chamber to a greenhouse. After a quantitative PCR analysis to verify copy number of the T-DNA insert, only single copy transgenic plants that exhibit tolerance to the selection agent were kept for harvest of T1 seed. Seeds were then harvested three to five months after transplanting. The method yielded single locus transformants at a rate of over 50% (Aldemita and Hodges 1996, Chan et al. 1993, Hiei et al. 1994).

### Example 34

### Phenotypic Evaluation Procedure

### 34.1 Evaluation Setup

[0944] Approximately 35 independent T0 rice transformants were generated. The primary transformants were transferred from a tissue culture chamber to a greenhouse for growing and harvest of T1 seed. Eight events, of which the T1 progeny segregated 3:1 for presence/absence of the transgene, were retained. For each of these events, approximately 10 T1 seedlings containing the transgene (hetero- and homo-zygotes) and approximately 10 T1 seedlings lacking the transgene (nullizygotes) were selected by monitoring visual marker expression. The transgenic plants and the corresponding nullizygotes were grown side-by-side at random positions. Greenhouse conditions were of shorts days (12 hours light), 28° C. in the light and 22° C. in the dark, and a relative humidity of 70%.

[0945] Four T1 events were further evaluated in the T2 generation following the same evaluation procedure as for the T1 generation but with more individuals per event.

### Drought Screen

[0946] Plants from T2 seeds are grown in potting soil under normal conditions until they approached the heading stage. They are then transferred to a “dry” section where irrigation is withheld. Humidity probes are inserted in randomly chosen pots to monitor the soil water content (SWC). When SWC goes below certain thresholds, the plants are automatically re-watered continuously until a normal level was reached again. The plants are then re-transferred again to normal conditions. The rest of the cultivation (plant maturation, seed harvest) is the same as for plants not grown under abiotic stress conditions. Growth and yield parameters are recorded as detailed for growth under normal conditions.

### Nitrogen use Efficiency Screen

[0947] Rice plants from T2 seeds are grown in potting soil under normal conditions except for the nutrient solution. The pots are watered from transplantation to maturation with a specific nutrient solution containing reduced N nitrogen (N) content, usually between 7 to 8 times less. The rest of the cultivation (plant maturation, seed harvest) is the same as for plants not grown under abiotic stress. Growth and yield parameters are recorded as detailed for growth under normal conditions.

[0948] Non-destructive oil measurements from rice seeds was measured using the Oxford QP20+ pulsed NMR. Whole seeds were used without dehusking.

### 34.2 Statistical Analysis: F-Test

[0949] A two factor ANOVA (analysis of variants) was used as a statistical model for the overall evaluation of plant phenotypic characteristics. An F-test was carried out on all the parameters measured of all the plants of all the events transformed with the gene of the present invention. The F-test was carried out to check for an effect of the gene over all the transformation events and to verify an overall effect of the gene, also known as a global gene effect. The threshold for significance for a true global gene effect was set at a 5% probability level for the F-test. A significant F-test value points to a gene effect, meaning that it is not only the mere presence or position of the gene that is causing the differences in phenotype.

### 34.3 Results

[0950] The best line showed an 11% increase in oil content compared to control plants, with an average increase in oil content of 6% over all lines and a p value from the F-test of <0.0001

### Example 35

### Transformation of Corn

[0951] Transformation of maize (Zea mays) is performed with a modification of the method described by Ishida et al. (1996) Nature Biotech 14(6): 745-50. Transformation is genotype-dependent in corn and only specific genotypes are amenable to transformation and regeneration. The inbred line A188 (University of Minnesota) or hybrids with A188 as a parent are good sources of donor material for tansformation, but other genotypes can be used successfully as well. Ears are harvested from corn plant approximately 11 days after pollination (DAP) when the length of the immature embryo is about 1 to 1.2 mm. Immature embryos are cocultivated with Agrobacterium tumefaciens containing the expression vector, and transgenic plants are recovered through organogenesis. Excised embryos are grown on callus induction medium, then maize regeneration medium, containing the selection agent (for example imidazolinone but various selection markers can be used). The Petri plates are incubated in the light at 25° C. for 2-3 weeks, or until shoots develop. The green shoots are transferred from each embryo to maize rooting medium and incubated at 25° C. for 2-3 weeks, until roots develop. The rooted shoots are transplanted to soil in the greenhouse. T1 seeds are produced from plants that exhibit tolerance to the selection agent and that contain a single copy of the T-DNA insert.

### Example 36

### Transformation of Wheat

[0952] Transformation of wheat is performed with the method described by Ishida et al. (1996) Nature Biotech 14(6): 745-50. The cultivar Bobwhite (available from CIMMYT, Mexico) is commonly used in transformation. Immature embryos are co-cultivated with Agrobacterium tumefaciens containing the expression vector, and transgenic plants are recovered through organogenesis. After incubation with Agrobacterium, the embryos are grown in vitro on callus induction medium, then regeneration medium, containing the selection agent (for example imidazolinone but various selection markers can be used). The Petri plates are incubated in the light at 25° C. for 2-3 weeks, or until shoots develop. The green shoots are transferred from each embryo to rooting medium and incubated at 25° C. for 2-3 weeks, until roots develop. The rooted shoots are transplanted to soil in the greenhouse. T1 seeds are produced from plants that exhibit tolerance to the selection agent and that contain a single copy of the T-DNA insert.

### Example 37

### Transformation of Soybean

[0953] Soybean is transformed according to a modification of the method described in the Texas A&M patent U.S. Pat. No. 5,164,310. Several commercial soybean varieties are amenable to transformation by this method. The cultivar Jack (available from the Illinois Seed foundation) is commonly used for transformation. Soybean seeds are sterilised for in vitro sowing. The hypocotyl, the radicle and one cotyledon are excised from seven-day old young seedlings. The epicotyl and the remaining cotyledon are further grown to develop axillary nodes. These axillary nodes are excised and incubated with Agrobacterium tumefaciens containing the expression vector. After the cocultivation treatment, the explants are washed and transferred to selection media. Regenerated shoots are excised and placed on a shoot elongation medium. Shoots no longer than 1 cm are placed on rooting medium until roots develop. The rooted shoots are transplanted to soil in the greenhouse. T1 seeds are produced from plants that exhibit tolerance to the selection agent and that contain a single copy of the T-DNA insert.

### Example 38

### Transformation of Rapeseed/Canola

[0954] Cotyledonary petioles and hypocotyls of 5-6 day old young seedling are used as explants for tissue culture and transformed according to Babic et al. (1998, Plant Cell Rep 17: 183-188). The commercial cultivar Westar (Agriculture Canada) is the standard variety used for transformation, but other varieties can also be used. Canola seeds are surface-sterilized for in vitro sowing. The cotyledon petiole explants with the cotyledon attached are excised from the in vitro seedlings, and inoculated with Agrobacterium (containing the expression vector) by dipping the cut end of the petiole explant into the bacterial suspension. The explants are then cultured for 2 days on MSBAP-3 medium containing 3 mg/l BAP, 3% sucrose, 0.7% Phytagar at 23° C., 16 hr light. After two days of co-cultivation with Agrobacterium, the petiole explants are transferred to MSBAP-3 medium containing 3 mg/l BAP, cefotaxime, carbenicillin, or timentin (300 mg/l) for 7 days, and then cultured on MSBAP-3 medium with cefotaxime, carbenicillin, or timentin and selection agent until shoot regeneration. When the shoots are 5-10 mm in length, they are cut and transferred to shoot elongation medium (MSBAP-0.5, containing 0.5 mg/l BAP). Shoots of about 2 cm in length are transferred to the rooting medium (MSO) for root induction. The rooted shoots are transplanted to soil in the greenhouse. T1 seeds are produced from plants that exhibit tolerance to the selection agent and that contain a single copy of the T-DNA insert.

### Example 39

### Transformation of Alfalfa

[0955] A regenerating clone of alfalfa (Medicago sativa) is transformed using the method of (McKersie et al., 1999 Plant Physiol 119: 839-847). Regeneration and transformation of alfalfa is genotype dependent and therefore a regenerating plant is required. Methods to obtain regenerating plants have been described. For example, these can be selected from the cultivar Rangelander (Agriculture Canada) or any other commercial alfalfa variety as described by Brown DCW and A Atanassov (1985. Plant Cell Tissue Organ Culture 4: 111-112). Alternatively, the RA3 variety (University of Wisconsin) has been selected for use in tissue culture (Walker et al., 1978 μm J Bot 65:654-659). Petiole explants are cocultivated with an overnight culture of Agrobacterium tumefaciens C58C1 pMP90 (McKersie et al., 1999 Plant Physiol 119: 839-847) or LBA4404 containing the expression vector. The explants are cocultivated for 3 d in the dark on SH induction medium containing 288 mg/L Pro, 53 mg/L thioproline, 4.35 g/L K2SO4, and 100 μm acetosyringinone. The explants are washed in half-strength Murashige-Skoog medium (Murashige and Skoog, 1962) and plated on the same SH induction medium without acetosyringinone but with a suitable selection agent and suitable antibiotic to inhibit Agrobacterium growth. After several weeks, somatic embryos are transferred to BOi2Y development medium containing no growth regulators, no antibiotics, and 50 g/L sucrose. Somatic embryos are subsequently germinated on half-strength Murashige-Skoog medium. Rooted seedlings were transplanted into pots and grown in a greenhouse. T1 seeds are produced from plants that exhibit tolerance to the selection agent and that contain a single copy of the T-DNA insert.

### Example 40

### Identification of Sequences Related to SEQ ID NO: 285 and SEQ ID NO: 286

[0956] Sequences (full length cDNA, ESTs or genomic) related to SEQ ID NO: 285 and/or protein sequences related to SEQ ID NO: 286 were identified amongst those maintained in the Entrez Nucleotides database at the National Center for Biotechnology Information (NCBI) using database sequence search tools, such as the Basic Local Alignment Tool (BLAST) (Altschul et al. (1990) J. Mol. Biol. 215:403-410; and Altschul et al. (1997) Nucleic Acids Res. 25:3389-3402). The program is used to find regions of local similarity between sequences by comparing nucleic acid or polypeptide sequences to sequence databases and by calculating the statistical significance of matches. The polypeptide encoded by SEQ ID NO: 285 was used for the TBLASTN algorithm, with default settings and the filter to ignore low complexity sequences set off. The output of the analysis was viewed by pairwise comparison, and ranked according to the probability score (E-value), where the score reflects the probability that a particular alignment occurs by chance (the lower the E-value, the more significant the hit). In addition to E-values, comparisons were also scored by percentage identity. Percentage identity refers to the number of identical nucleotides (or amino acids) between the two compared nucleic acid (or polypeptide) sequences over a particular length. In some instances, the default parameters may be adjusted to modify the stringency of the search.

[0957] In addition to the publicly available nucleic acid sequences available at NCBI, proprietary sequence databases are also searched following the same procedure as described herein above.

[0958] Table J provides a list of nucleic acid and protein sequences related to the nucleic acid sequence as represented by SEQ ID NO: 285 and the protein sequence represented by SEQ ID NO: 286.

TABLE J
Nucleic acid sequences related to the nucleic acid sequence (SEQ ID NO: 1) useful in
the methods of the present invention, and the corresponding deduced polypeptides.

| | | | | Database | |
|---|---|---|---|---|---|
| | Source | Nucleic acid | Polypeptide | accession | |
| Name | organism | SEQ ID NO: | SEQ ID NO: | number | Status |
| SYB1 | Arabidopsis | 285 | 286 | NM112438 | Full length |
| | thaliana | | | | |
| zinc finger | Gossypium | 287 | 288 | AAZ94630 | Full length |
| protein-like | hirsutum | | | | |
| protein | | | | | |
| putative zinc | Zea mays | 289 | 290 | Q53AV6 | Full length |
| finger protein ZF2 | | | | | |
| Zinc finger | Oryza sativa | 291 | 292 | Q6Z6E6 | Full length |
| transcription | | | | | |
| factor ZFP30 | | | | | |
| Hypothetical | Arabidopsis | 293 | 294 | Q8GWD1 | Full length |
| protein | thaliana | | | | |
| At5g25490 | | | | | |
| Putative zinc | Oryza sativa | 295 | 296 | Q9SW92 | Full length |
| finger protein | | | | | |
| Putative zinc | Oryza sativa | 297 | 298 | Q8RYZ5 | Full length |
| finger | | | | | |
| transcription | | | | | |
| factor | | | | | |
| GlimmerM protein | Beta vulgaris | 299 | 300 | ABD83289 | Full length |
| 152 | | | | | |
| Predicted protein | Arabidopsis | 301 | 302 | Q8S8K1 | Full length |
| At2g17975 | thaliana | | | | |
| Hypothetical | Arabidopsis | 303 | 304 | Q8GZ43 | Full length |
| RanBP2-type | thaliana | | | | |
| zinc-finger protein | | | | | |
| At1g67325 | | | | | |
| P53 binding | Oryza sativa | 305 | 306 | Q7F1K4 | Full length |
| protein-like | | | | | |
| Putative p53 | Oryza sativa | 307 | 308 | Q7XHQ8 | Full length |
| binding protein | | | | | |
| Hypothetical | Brassica rapa | 309 | 310 | CX272690 | Full length |
| protein | | | | | |
| Hypothetical | Euphorbia | 311 | 312 | DV143669 | Full length |
| protein | esula | | | | |
| Hypothetical | Gossypium | 313 | 314 | DR459119 | Full length |
| protein | hirsutum | | | | |
| Hypothetical | Vitis vinifera | 315 | 316 | DV221228 | Full length |
| protein | | | | | |
| Hypothetical | Populus | 317 | 318 | DT496999 | Full length |
| protein | trichocarpa | | | | |
| Hypothetical | Gossypium | 319 | 320 | DT457997 | Full length |
| protein | hirsutum | | | | |
| Hypothetical | Lactuca | 321 | 322 | DW105125 | Full length |
| protein | serriola | | | | |
| Hypothetical | Glycine max | 323 | 324 | BG238374 | Full length |
| protein | | | | | |
| Hypothetical | Populus | 325 | 226 | DT494117 | Full length |
| protein | trichocarpa | | | | |
| Hypothetical | Populus sp. | 327 | 328 | DV465465 | Full length |
| protein | | | | | |
| zinc finger | Oryza sativa | 329 | 330 | AY219846 | Full length |
| transcription | | | | | |
| factor | | | | | |
| Hypothetical | Panicum | 331 | 332 | DN152082 | Full length |
| protein | virgatum | | | | |
| Zinc finger, | Medicago | 333 | 334 | Q1RWK5 | Full length |
| RanBP2-type | truncatula | | | | |
| Zinc finger, | Medicago | 335 | 336 | Q1S406 | Full length |
| RanBP2-type | truncatula | | | | |
| Hypothetical | Yucca | 337 | 338 | DT581158 | Full length |
| protein | filamentosa | | | | |
| Hypothetical | Hordeum | 339 | 340 | BQ471337 | Full length |
| protein | vulgare | | | | |

### Example 41

### Alignment of Relevant Polypeptide Sequences

[0959] AlignX from the Vector NTI (Invitrogen) is based on the popular Clustal algorithm of progressive alignment (Thompson et al. (1997) Nucleic Acids Res 25:4876-4882; Chenna et al. (2003). Nucleic Acids Res 31:3497-3500). A phylogenetic tree can be constructed using a neighbour-joining clustering algorithm. Default values are for the gap open penalty of 10, for the gap extension penalty of 0.1 and the selected weight matrix is Blosum 62 (if polypeptides are aligned).

[0960] The result of a multiple sequence alignment using polypeptides relevant in identifying the ones useful in performing the methods of the invention is shown in FIG. 23a of the present application. The three Zinc-finger domains can be easily identified.

### Example 42

### Calculation of Global Percentage Identity between Polypeptide Sequences useful in Performing the Methods of the Invention

[0961] Global percentages of similarity and identity between full length polypeptide sequences useful in performing the methods of the invention were determined using one of the methods available in the art, the MatGAT (Matrix Global Alignment Tool) software (BMC Bioinformatics. 2003 4:29. MatGAT: an application that generates similarity/identity matrices using protein or DNA sequences. Campanella J J, Bitincka L, Smalley J; software hosted by Ledion Bitincka). MatGAT software generates similarity/identity matrices for DNA or protein sequences without needing pre-alignment of the data. The program performs a series of pair-wise alignments using the Myers and Miller global alignment algorithm (with a gap opening penalty of 12, and a gap extension penalty of 2), calculates similarity and identity using for example Blosum 62 (for polypeptides), and then places the results in a distance matrix. Sequence similarity is shown in the bottom half of the dividing line and sequence identity is shown in the top half of the diagonal dividing line.

Parameters used in the comparison were:
[0962] Scoring matrix: Blosum62
[0963] First Gap: 12
[0964] Extending gap: 2

[0965] Results of the software analysis are shown in Table K for the global similarity and identity over the full length of the polypeptide sequences (excluding the partial polypeptide sequences). Percentage identity is given above the diagonal and percentage similarity is given below the diagonal.

[0966] The percentage identity between the polypeptide sequences useful in performing the methods of the invention can be as low as 16.9% amino acid identity compared to SEQ ID NO: 286.

TABLE K
MatGAT results for global similarity and identity over the full length of the polypeptide sequences.

| | 1 | 2 | 3 | 4 | 5 | 6 | 7 | 8 | 9 | 10 | 11 | 12 | 13 | 14 |
|---|---|---|---|---|---|---|---|---|---|---|---|---|---|---|
| 1. SEQID286 | | 69.5 | 56.1 | 61.4 | 58.7 | 50.6 | 37.9 | 63.2 | 24.2 | 20.9 | 16.9 | 20.7 | 59.1 | 74.7 |
| 2. SEQID288 | 75.6 | | 57.5 | 60.2 | 58.2 | 54.7 | 43 | 59.2 | 20.1 | 17.1 | 15.7 | 18.3 | 50 | 73.1 |
| 3. SEQID290 | 67 | 67 | | 84.3 | 57.5 | 49.4 | 38.9 | 66.8 | 26.3 | 20.4 | 17.3 | 21.5 | 39.7 | 59.9 |
| 4. SEQID292 | 71.1 | 69.9 | 89.8 | | 58.2 | 55.4 | 42.9 | 62.5 | 23.7 | 20.3 | 17 | 22.5 | 46.2 | 64.5 |
| 5. SEQID294 | 68.2 | 66.5 | 68.8 | 67.1 | | 48.6 | 39.1 | 59.9 | 22.3 | 19.8 | 17.2 | 20.4 | 43 | 59.6 |
| 6. SEQID296 | 63.4 | 69 | 60.8 | 64.5 | 56.5 | | 45.8 | 48.6 | 23.6 | 19.1 | 16.7 | 18.3 | 38 | 54 |
| 7. SEQID298 | 56.1 | 66.9 | 54 | 58.4 | 55.9 | 61.4 | | 37 | 20.5 | 17 | 14.5 | 18.9 | 29.9 | 39.2 |
| 8. SEQID300 | 68 | 64.5 | 75 | 73.3 | 71.5 | 58.7 | 54.7 | | 24.5 | 21.3 | 19.8 | 22.6 | 47.1 | 61.8 |
| 9. SEQID302 | 32.5 | 29.1 | 36.9 | 34 | 32.5 | 32.1 | 31.3 | 32.5 | | 22.3 | 17.9 | 21.4 | 16.6 | 21.6 |
| 10. SEQID304 | 27.1 | 22.6 | 29.9 | 29.9 | 27.4 | 27.4 | 20.8 | 28.1 | 39.9 | | 47 | 36.1 | 17.2 | 18.8 |
| 11. SEQID306 | 23.9 | 21.3 | 25.4 | 24.2 | 24.5 | 22.2 | 19.9 | 28 | 33.7 | 57.9 | | 31.2 | 15.1 | 18.1 |
| 12. SEQID308 | 28.5 | 24.9 | 28.2 | 29.2 | 29.6 | 24.9 | 24.2 | 29.2 | 35.7 | 49.7 | 40.3 | | 16.8 | 20.4 |
| 13. SEQID310 | 63.4 | 57.6 | 48.3 | 53.6 | 50.6 | 48.3 | 50.4 | 52.3 | 23.1 | 21.9 | 19 | 21.7 | | 51.6 |
| 14. SEQID312 | 84.1 | 82.1 | 71.6 | 75.3 | 70 | 67.3 | 61.5 | 68 | 32.5 | 25.3 | 23.3 | 29.6 | 56.4 | |
| 15. SEQID314 | 78.7 | 85.1 | 69.3 | 73.5 | 67.1 | 68.2 | 62.2 | 69.2 | 30.2 | 25 | 22.5 | 26.4 | 58.8 | 84.6 |
| 16. SEQID316 | 79.9 | 84.7 | 74.4 | 79.5 | 73.5 | 66 | 64.7 | 75 | 31.7 | 26.4 | 23.3 | 28.9 | 58 | 86.5 |
| 17. SEQID318 | 77.4 | 85.4 | 70.5 | 76.5 | 70 | 68.2 | 60.9 | 70.3 | 31.3 | 26 | 22.2 | 28.5 | 58.9 | 86.5 |
| 18. SEQID320 | 78.7 | 78.7 | 73.3 | 79.5 | 73.5 | 66.5 | 63.9 | 74.4 | 31.3 | 26.7 | 25.1 | 31.4 | 56.8 | 84.6 |
| 19. SEQID322 | 75.7 | 71 | 73.3 | 75.1 | 74.7 | 63.3 | 56.2 | 74.4 | 29.9 | 27.4 | 23.6 | 28.2 | 53.3 | 76.9 |
| 20. SEQID324 | 74.4 | 83.6 | 68.8 | 74.7 | 67.1 | 69.9 | 62.3 | 69.8 | 30.2 | 25 | 22.5 | 24.2 | 60.3 | 82.1 |
| 21. SEQID326 | 75 | 76.1 | 69.9 | 72.9 | 74.1 | 64.2 | 59.7 | 72.7 | 31 | 28.8 | 24.5 | 30.7 | 53.5 | 81.1 |
| 22. SEQID328 | 76.2 | 78.1 | 68.8 | 74.7 | 73.5 | 69 | 65.2 | 73.3 | 30.2 | 28.5 | 23.6 | 29.2 | 54.2 | 82.7 |
| 23. SEQID330 | 70.5 | 69.3 | 89.2 | 99.4 | 66.5 | 64.5 | 57.8 | 72.7 | 33.6 | 29.5 | 24.8 | 29.2 | 53 | 74.7 |
| 24. SEQID332 | 70.1 | 71.8 | 89.8 | 94.6 | 67.1 | 63.8 | 57.1 | 70.9 | 35.4 | 29.2 | 23.9 | 32.1 | 50.9 | 76.1 |
| 25. SEQID334 | 57.3 | 66.7 | 55.7 | 59 | 55.9 | 58.6 | 60.4 | 57 | 30.2 | 28.5 | 22.5 | 26 | 44.4 | 64.1 |
| 26. SEQID336 | 70.6 | 64.7 | 68.8 | 71.2 | 73.5 | 58.8 | 56.5 | 72.1 | 34.3 | 28.8 | 26.2 | 27.4 | 53.5 | 73.5 |
| 27. SEQID338 | 72 | 75.3 | 76.7 | 81.3 | 69.4 | 68.2 | 66.2 | 70.3 | 35.4 | 28.5 | 23.1 | 27.1 | 52.6 | 79.5 |
| 28. SEQID340 | 66.1 | 63.9 | 85.2 | 84.2 | 63.4 | 56.8 | 51.9 | 75.4 | 35.4 | 30.9 | 25.4 | 32.1 | 47 | 67.8 |
| | 15 | 16 | 17 | 18 | 19 | 20 | 21 | 22 | 23 | 24 | 25 | 26 | 27 | 28 |
| 1. SEQID286 | 71.5 | 71.3 | 69 | 67.9 | 66.3 | 67.1 | 63.2 | 65.3 | 61.4 | 60.3 | 40.8 | 60.1 | 64.1 | 57.8 |
| 2. SEQID288 | 81.1 | 75.5 | 74.3 | 69.2 | 65.9 | 70.4 | 68.1 | 67.9 | 59.6 | 63.1 | 46.3 | 58.2 | 66.3 | 57 |
| 3. SEQID290 | 61.3 | 63 | 63 | 63.5 | 61.6 | 58.7 | 60.4 | 59.3 | 83.7 | 87.5 | 38.8 | 56.9 | 69.5 | 79.9 |
| 4. SEQID292 | 66.7 | 67.8 | 65.5 | 69.8 | 65.9 | 65.1 | 61.7 | 64 | 99.4 | 91 | 44.5 | 59.1 | 75.4 | 80.5 |
| 5. SEQID294 | 60.6 | 64.1 | 62.9 | 63.7 | 65.1 | 57.6 | 62.6 | 62 | 57.6 | 57.3 | 38.3 | 59.6 | 62.8 | 55.3 |
| 6. SEQID296 | 55.1 | 52.3 | 53.2 | 51.8 | 53.1 | 53.8 | 52.4 | 55.6 | 55.4 | 51.5 | 41.1 | 46.4 | 57.1 | 48.6 |
| 7. SEQID298 | 43.9 | 43.5 | 41.3 | 44.5 | 38.8 | 42.3 | 40.8 | 43 | 42.3 | 41.3 | 42 | 39.1 | 46.6 | 38.5 |
| 8. SEQID300 | 64.6 | 69.5 | 65.7 | 67.4 | 65 | 61.4 | 65.7 | 66.1 | 62.5 | 64.9 | 41.2 | 62.7 | 64 | 65.4 |
| 9. SEQID302 | 21.2 | 23.1 | 23.4 | 24.5 | 20.5 | 23.4 | 23.4 | 23.1 | 23.7 | 24.8 | 23.8 | 23.4 | 24.7 | 24.8 |
| 10. SEQID304 | 18.8 | 20 | 19.8 | 20.7 | 19.8 | 19.5 | 20.3 | 20.3 | 20.3 | 20.8 | 21.5 | 20.3 | 20.8 | 21.9 |
| 11. SEQID306 | 16.3 | 17.5 | 16.9 | 18.9 | 17.1 | 16.3 | 17.2 | 17.5 | 17.3 | 17.6 | 17.5 | 18.1 | 16.8 | 18.1 |
| 12. SEQID308 | 19.9 | 20 | 21.5 | 23.1 | 21.1 | 18.5 | 23 | 22.3 | 22.5 | 23.2 | 19.4 | 18.6 | 20.4 | 23.2 |
| 13. SEQID310 | 52.6 | 53.2 | 50.6 | 52.9 | 48.9 | 54 | 49.4 | 50 | 46.2 | 43.4 | 29.1 | 46.8 | 48.4 | 41.9 |
| 14. SEQID312 | 78.3 | 77.8 | 81.1 | 74.7 | 67.6 | 76.4 | 69.7 | 70.2 | 64.5 | 62.4 | 41.4 | 63.5 | 69.8 | 57.8 |
| 15. SEQID314 | | 80.9 | 80.4 | 78.2 | 67.8 | 77 | 71.3 | 72 | 66.1 | 66.7 | 43.9 | 67.1 | 71.9 | 61.8 |
| 16. SEQID316 | 90.7 | | 82.9 | 80 | 73.5 | 79.2 | 78 | 78.1 | 67.8 | 68 | 47.1 | 67.1 | 77.4 | 63.4 |
| 17. SEQID318 | 88.7 | 92.1 | | 76.3 | 68.6 | 72.9 | 73.6 | 71.6 | 65.5 | 66.7 | 42.9 | 65.9 | 73 | 62.9 |
| 18. SEQID320 | 84.5 | 89 | 86.5 | | 71.8 | 72 | 79 | 82.9 | 69.2 | 66.5 | 43.8 | 70.6 | 72.5 | 62.4 |
| 19. SEQID322 | 73.4 | 79.3 | 76.3 | 78.1 | | 65.9 | 73.8 | 72.1 | 65.4 | 62.4 | 43.4 | 64.1 | 66.9 | 64.7 |
| 20. SEQID324 | 84.5 | 87.3 | 83.4 | 80.6 | 73.4 | | 67.1 | 68.2 | 65.1 | 62.7 | 45.5 | 63.2 | 70.7 | 57.5 |
| 21. SEQID326 | 81.8 | 84.9 | 81.1 | 86.8 | 79.3 | 77.4 | | 91.9 | 61.7 | 59.8 | 43 | 67.6 | 69.5 | 62 |
| 22. SEQID328 | 83.2 | 86.5 | 81.3 | 91 | 78.1 | 79.4 | 94.3 | | 64.2 | 63.2 | 44.1 | 65.9 | 70.2 | 58.3 |
| 23. SEQID330 | 72.9 | 78.9 | 75.9 | 78.9 | 74.6 | 74.1 | 72.3 | 74.7 | | 90.4 | 44.5 | 58.6 | 75.4 | 80 |
| 24. SEQID332 | 74.8 | 81 | 76.7 | 78.5 | 74 | 73.6 | 74.2 | 75.5 | 94 | | 42.7 | 57.4 | 73.3 | 80.3 |
| 25. SEQID334 | 66.2 | 64.7 | 63.6 | 62.6 | 58.6 | 65.8 | 59.1 | 61.3 | 59 | 60.1 | | 40 | 46 | 38.4 |
| 26. SEQID336 | 72.4 | 73.5 | 74.7 | 77.1 | 73.5 | 72.4 | 74.1 | 73.5 | 70.6 | 69.4 | 54.1 | | 63.2 | 54.5 |
| 27. SEQID338 | 79.9 | 85.1 | 81.8 | 81.3 | 74 | 79.9 | 76.1 | 78.7 | 80.7 | 80.4 | 64.3 | 71.8 | | 69 |
| 28. SEQID340 | 67.2 | 71.6 | 69.4 | 69.4 | 72.1 | 65.6 | 71 | 68.3 | 83.6 | 83.6 | 51.9 | 67.2 | 73.2 | |

### Example 43

### Identification of Domains Comprised in Polypeptide Sequences useful in Performing the Methods of the Invention

[0967] The Integrated Resource of Protein Families, Domains and Sites (InterPro) database is an integrated interface for the commonly used signature databases for text- and sequence-based searches. The InterPro database combines these databases, which use different methodologies and varying degrees of biological information about well-characterized proteins to derive protein signatures. Collaborating databases include SWISS-PROT, PROSITE, TrEMBL, PRINTS, ProDom and Pfam, Smart and TIGRFAMs. Interpro is hosted at the European Bioinformatics Institute in the United Kingdom.

[0968] The results of the InterPro scan of the polypeptide sequence as represented by SEQ ID NO: 286 are presented in Table L.

TABLE L
InterPro scan results of the polypeptide sequence
as represented by SEQ ID NO: 286

| Database | Accession number | Accession name |
|---|---|---|
| InterPro | IPR001878 | Zinc finger, RanBP2-type |
| PROFILE | PS50199 | ZF_RANBP2_2 |
| PROSITE | PS01358 | ZF_RANBP2_1 |
| PFAM | PF00641 | zf-RanBP |
| SMART | SM00547 | ZnF_RBZ |

### Example 44

### Topology Prediction of the Polypeptide Sequences Useful in Performing the Methods of the Invention (Subcellular Localization, Transmembrane . . . )

[0969] TargetP 1.1 predicts the subcellular location of eukaryotic proteins. The location assignment is based on the predicted presence of any of the N-terminal pre-sequences: chloroplast transit peptide (cTP), mitochondrial targeting peptide (mTP) or secretory pathway signal peptide (SP). Scores on which the final prediction is based are not really probabilities, and they do not necessarily add to one. However, the location with the highest score is the most likely according to TargetP, and the relationship between the scores (the reliability class) may be an indication of how certain the prediction is. The reliability class (RC) ranges from 1 to 5, where 1 indicates the strongest prediction. TargetP is maintained at the server of the Technical University of Denmark.

[0970] For the sequences predicted to contain an N-terminal presequence a potential cleavage site can also be predicted.

[0971] A number of parameters were selected, such as organism group (non-plant or plant), cutoff sets (none, predefined set of cutoffs, or user-specified set of cutoffs), and the calculation of prediction of cleavage sites (yes or no).

[0972] The results of TargetP 1.1 analysis of the polypeptide sequence as represented by SEQ ID NO: 286 are presented Table M. The “plant” organism group has been selected, no cutoffs defined, and the predicted length of the transit peptide requested. There is no clear prediction of the subcellular localisation, only a weak prediction for a mitochondrial localisation (reliability class 5, which is the lowest reliability). SYB1 proteins therefore may also be located in the cytoplasm.

TABLE M
TargetP 1.1 analysis of the polypeptide sequence
as represented by SEQ ID NO: 286

| | |
|---|---|
| Length (AA) | 164 |
| Chloroplastic transit peptide | 0.417 |
| Mitochondrial transit peptide | 0.505 |
| Secretory pathway signal peptide | 0.014 |
| Other subcellular targeting | 0.184 |
| Predicted Location | Mitochondrial |
| Reliability class | 5 |
| Predicted transit peptide length | 12 |

[0973] Many other algorithms can be used to perform such analyses, including:
[0974] ChloroP 1.1 hosted on the server of the Technical University of Denmark;
[0975] Protein Prowler Subcellular Localisation Predictor version 1.2 hosted on the server of the Institute for Molecular Bioscience, University of Queensland, Brisbane, Australia;
[0976] PENCE Proteome Analyst PA-GOSUB 2.5 hosted on the server of the University of Alberta, Edmonton, Alberta, Canada;

### Example 45

### Assay Related to the Polypeptide Sequences Useful in Performing the Methods of the Invention

[0977] The polypeptide sequence as represented by SEQ ID NO: 286 may interact with nucleic acids as well as with proteins, by virtue of the presence of the Zinc finger domains. DNA binding assays are well known in the art, including PCR-assisted DNA binding site selection and a DNA binding gel-shift assay; for a general reference, see Current Protocols in Molecular Biology, Volumes 1 and 2, Ausubel et al. (1994), Current Protocols.

[0978] The protein represented by SEQ ID NO: 286 is predicted to interact with several proteins (results from analysis with the SMART database), as shown in Table N. The functionality of a SYB1 protein may thus be tested in a yeast two-hybrid screen with candidate ligand proteins.

TABLE N
Putative interactors of SEQ ID NO: 286

| Description | Identifier |
|---|---|
| putative cytochrome P450 | At2g46960 |
| Unknown | At5g03670 |
| weak similarity to cytochrome b558/566, subunit B | F18B3.90 |
| hypersensitive-induced response protein | MQB2.6″ |
| glycosyl hydrolase family 9 | T21L14.7 |
| Unknown | F26O13.50 |
| brix domain-containing protein | At5g61770 |
| peterpan | At5g61770 |
| Unknown/Predicted GTPase | Q9SJF1/At1g08410 |
| Nucleotide binding protein | Q9SHS8/At2g27200 |

[0979] Furthermore, expression of a SYB1 protein according to the methods of the present invention results in increased seed yield as described below.

### Example 46

### Cloning of Nucleic Acid Sequence as Represented by SEQ ID NO: 285

[0980] Unless otherwise stated, recombinant DNA techniques are performed according to standard protocols described in (Sambrook (2001) Molecular Cloning: a laboratory manual, 3rd Edition Cold Spring Harbor Laboratory Press, CSH, New York) or in Volumes 1 and 2 of Ausubel et al. (1994), Current Protocols in Molecular Biology, Current Protocols. Standard materials and methods for plant molecular work are described in Plant Molecular Biology Labfax (1993) by R.D.D. Croy, published by BIOS Scientific Publications Ltd (UK) and Blackwell Scientific Publications (UK).

[0981] The Arabidopsis thaliana SYB1 gene was amplified by PCR using as template an Arabidopsis thaliana seedling cDNA library (Invitrogen, Paisley, UK). After reverse transcription of RNA extracted from seedlings, the cDNAs were cloned into pCMV Sport 6.0. Average insert size of the bank was 1.5 kb and the original number of clones was of the order of 1.59×107 cfu. Original titer was determined to be 9.6×105 cfu/ml after first amplification of 6×1011 cfu/ml. After plasmid extraction, 200 ng of template was used in a 50 μl PCR mix. Primers prm5539 (SEQ ID NO: 341; sense, start codon in bold, AttB1 site in italic: 5′-ggggacaagtttgtacaaaaaagcaggcttaaacaatgagcagacccggagatt -3′) and prm5540 (SEQ ID NO: 342; reverse, complementary, Att B2 site in italic: 5′-ggggaccactttgtacaagaaagctgggtagacaaggctacttcaaaagca -3′), which include the AttB sites for Gateway recombination, were used for PCR amplification. PCR was performed using Hifi Taq DNA polymerase in standard conditions. A PCR fragment of 559 by (including attB sites) was amplified and purified also using standard methods. The first step of the Gateway procedure, the BP reaction, was then performed, during which the PCR fragment recombines in vivo with the pDONR201 plasmid to produce, according to the Gateway terminology, an “entry clone”, p58a. Plasmid pDONR201 was purchased from Invitrogen, as part of the Gateway® technology.

### Example 47

### Expression Vector Construction using the Nucleic Acid Sequence as Represented by SEQ ID NO: 285

[0982] The entry clone p58a was subsequently used in an LR reaction with p0640, a destination vector used for Oryza sativa transformation. This vector contains as functional elements within the T-DNA borders: a plant selectable marker; a screenable marker expression cassette; and a Gateway cassette intended for LR in vivo recombination with the nucleic acid sequence of interest already cloned in the entry clone. A rice GOS2 promoter (SEQ ID NO: 343) for constitutive expression (pGOS2) was located upstream of this Gateway cassette.

[0983] After the LR recombination step, the resulting expression vector pGOS2::SYB1 (FIG. 24) was transformed into Agrobacterium strain LBA4044 according to methods well known in the art.

### Example 48

### Plant Transformation

### Rice Transformation

[0984] The Agrobacterium containing the expression vector was used to transform Oryza sativa plants. Mature dry seeds of the rice japonica cultivar Nipponbare were dehusked. Sterilization was carried out by incubating for one minute in 70% ethanol, followed by 30 minutes in 0.2% HgCl2, followed by a 6 times 15 minutes wash with sterile distilled water. The sterile seeds were then germinated on a medium containing 2,4-D (callus induction medium). After incubation in the dark for four weeks, embryogenic, scutellum-derived calli were excised and propagated on the same medium. After two weeks, the calli were multiplied or propagated by subculture on the same medium for another 2 weeks. Embryogenic callus pieces were sub-cultured on fresh medium 3 days before co-cultivation (to boost cell division activity).

[0985] Agrobacterium strain LBA4404 containing the expression vector was used for cocultivation. Agrobacterium was inoculated on AB medium with the appropriate antibiotics and cultured for 3 days at 28° C. The bacteria were then collected and suspended in liquid co-cultivation medium to a density (OD600) of about 1. The suspension was then transferred to a Petri dish and the calli immersed in the suspension for 15 minutes. The callus tissues were then blotted dry on a filter paper and transferred to solidified, co-cultivation medium and incubated for 3 days in the dark at 25° C. Co-cultivated calli were grown on 2,4-D-containing medium for 4 weeks in the dark at 28° C. in the presence of a selection agent. During this period, rapidly growing resistant callus islands developed. After transfer of this material to a regeneration medium and incubation in the light, the embryogenic potential was released and shoots developed in the next four to five weeks. Shoots were excised from the calli and incubated for 2 to 3 weeks on an auxin-containing medium from which they were transferred to soil. Hardened shoots were grown under high humidity and short days in a greenhouse.

[0986] Approximately 35 independent T0 rice transformants were generated for one construct. The primary transformants were transferred from a tissue culture chamber to a greenhouse. After a quantitative PCR analysis to verify copy number of the T-DNA insert, only single copy transgenic plants that exhibit tolerance to the selection agent were kept for harvest of T1 seed. Seeds were then harvested three to five months after transplanting. The method yielded single locus transformants at a rate of over 50% (Aldemita and Hodges 1996, Chan et al. 1993, Hiei et al. 1994).

### Corn Transformation

[0987] Transformation of maize (Zea mays) is performed with a modification of the method described by Ishida et al. (1996) Nature Biotech 14(6): 745-50. Transformation is genotype-dependent in corn and only specific genotypes are amenable to transformation and regeneration. The inbred line A188 (University of Minnesota) or hybrids with A188 as a parent are good sources of donor material for transformation, but other genotypes can be used successfully as well. Ears are harvested from corn plant approximately 11 days after pollination (DAP) when the length of the immature embryo is about 1 to 1.2 mm. Immature embryos are cocultivated with Agrobacterium tumefaciens containing the expression vector, and transgenic plants are recovered through organogenesis. Excised embryos are grown on callus induction medium, then maize regeneration medium, containing the selection agent (for example imidazolinone but various selection markers can be used). The Petri plates are incubated in the light at 25° C. for 2-3 weeks, or until shoots develop. The green shoots are transferred from each embryo to maize rooting medium and incubated at 25° C. for 2-3 weeks, until roots develop. The rooted shoots are transplanted to soil in the greenhouse. T1 seeds are produced from plants that exhibit tolerance to the selection agent and that contain a single copy of the T-DNA insert.

### Wheat Transformation

[0988] Transformation of wheat is performed with the method described by Ishida et al. (1996) Nature Biotech 14(6): 745-50. The cultivar Bobwhite (available from CIMMYT, Mexico) is commonly used in transformation. Immature embryos are co-cultivated with Agrobacterium tumefaciens containing the expression vector, and transgenic plants are recovered through organogenesis. After incubation with Agrobacterium, the embryos are grown in vitro on callus induction medium, then regeneration medium, containing the selection agent (for example imidazolinone but various selection markers can be used). The Petri plates are incubated in the light at 25° C. for 2-3 weeks, or until shoots develop. The green shoots are transferred from each embryo to rooting medium and incubated at 25° C. for 2-3 weeks, until roots develop. The rooted shoots are transplanted to soil in the greenhouse. T1 seeds are produced from plants that exhibit tolerance to the selection agent and that contain a single copy of the T-DNA insert.

### Soybean Transformation

[0989] Soybean is transformed according to a modification of the method described in the Texas A&M patent U.S. Pat. No. 5,164,310. Several commercial soybean varieties are amenable to transformation by this method. The cultivar Jack (available from the Illinois Seed foundation) is commonly used for transformation. Soybean seeds are sterilised for in vitro sowing. The hypocotyl, the radicle and one cotyledon are excised from seven-day old young seedlings. The epicotyl and the remaining cotyledon are further grown to develop axillary nodes. These axillary nodes are excised and incubated with Agrobacterium tumefaciens containing the expression vector. After the cocultivation treatment, the explants are washed and transferred to selection media. Regenerated shoots are excised and placed on a shoot elongation medium. Shoots no longer than 1 cm are placed on rooting medium until roots develop. The rooted shoots are transplanted to soil in the greenhouse. T1 seeds are produced from plants that exhibit tolerance to the selection agent and that contain a single copy of the T-DNA insert.

### Rapeseed/Canola Transformation

[0990] Cotyledonary petioles and hypocotyls of 5-6 day old young seedling are used as explants for tissue culture and transformed according to Babic et al. (1998, Plant Cell Rep 17: 183-188). The commercial cultivar Westar (Agriculture Canada) is the standard variety used for transformation, but other varieties can also be used. Canola seeds are surface-sterilized for in vitro sowing. The cotyledon petiole explants with the cotyledon attached are excised from the in vitro seedlings, and inoculated with Agrobacterium (containing the expression vector) by dipping the cut end of the petiole explant into the bacterial suspension. The explants are then cultured for 2 days on MSBAP-3 medium containing 3 mg/l BAP, 3% sucrose, 0.7% Phytagar at 23° C., 16 hr light. After two days of co-cultivation with Agrobacterium, the petiole explants are transferred to MSBAP-3 medium containing 3 mg/l BAP, cefotaxime, carbenicillin, or timentin (300 mg/l) for 7 days, and then cultured on MSBAP-3 medium with cefotaxime, carbenicillin, or timentin and selection agent until shoot regeneration. When the shoots are 5-10 mm in length, they are cut and transferred to shoot elongation medium (MSBAP-0.5, containing 0.5 mg/l BAP). Shoots of about 2 cm in length are transferred to the rooting medium (MS0) for root induction. The rooted shoots are transplanted to soil in the greenhouse. T1 seeds are produced from plants that exhibit tolerance to the selection agent and that contain a single copy of the T-DNA insert.

### Alfalfa Transformation

[0991] A regenerating clone of alfalfa (Medicago sativa) is transformed using the method of (McKersie et al., 1999 Plant Physiol 119: 839-847). Regeneration and transformation of alfalfa is genotype dependent and therefore a regenerating plant is required. Methods to obtain regenerating plants have been described. For example, these can be selected from the cultivar Rangelander (Agriculture Canada) or any other commercial alfalfa variety as described by Brown D C W and A Atanassov (1985. Plant Cell Tissue Organ Culture 4: 111-112). Alternatively, the RA3 variety (University of Wisconsin) has been selected for use in tissue culture (Walker et al., 1978 Am J Bot 65:654-659). Petiole explants are cocultivated with an overnight culture of Agrobacterium tumefaciens C58C1 pMP90 (McKersie et al., 1999 Plant Physiol 119: 839-847) or LBA4404 containing the expression vector. The explants are cocultivated for 3 d in the dark on SH induction medium containing 288 mg/L Pro, 53 mg/L thioproline, 4.35 g/L K2SO4, and 100 μm acetosyringinone. The explants are washed in half-strength Murashige-Skoog medium (Murashige and Skoog, 1962) and plated on the same SH induction medium without acetosyringinone but with a suitable selection agent and suitable antibiotic to inhibit Agrobacterium growth. After several weeks, somatic embryos are transferred to BOi2Y development medium containing no growth regulators, no antibiotics, and 50 g/L sucrose. Somatic embryos are subsequently germinated on half-strength Murashige-Skoog medium. Rooted seedlings were transplanted into pots and grown in a greenhouse. T1 seeds are produced from plants that exhibit tolerance to the selection agent and that contain a single copy of the T-DNA insert.

### Example 49

### Phenotypic Evaluation Procedure

### 49.1 Evaluation Setup

[0992] Approximately 35 independent T0 rice transformants were generated. The primary transformants were transferred from a tissue culture chamber to a greenhouse for growing and harvest of T1 seed. Six events, of which the T1 progeny segregated 3:1 for presence/absence of the transgene, were retained. For each of these events, approximately 10 T1 seedlings containing the transgene (hetero- and homo-zygotes) and approximately 10 T1 seedlings lacking the transgene (nullizygotes) were selected by monitoring visual marker expression. The transgenic plants and the corresponding nullizygotes were grown side-by-side at random positions. Greenhouse conditions were of shorts days (12 hours light), 28° C. in the light and 22° C. in the dark, and a relative humidity of 70%.

### Drought Screen

[0993] Plants from T2 seeds are grown in potting soil under normal conditions until they approached the heading stage. They are then transferred to a “dry” section where irrigation is withheld. Humidity probes are inserted in randomly chosen pots to monitor the soil water content (SWC). When SWC goes below certain thresholds, the plants are automatically re-watered continuously until a normal level was reached again. The plants are then re-transferred again to normal conditions. The rest of the cultivation (plant maturation, seed harvest) is the same as for plants not grown under abiotic stress conditions. Growth and yield parameters are recorded as detailed for growth under normal conditions.

### Nitrogen use Efficiency Screen

[0994] Rice plants from T2 seeds are grown in potting soil under normal conditions except for the nutrient solution. The pots are watered from transplantation to maturation with a specific nutrient solution containing reduced N nitrogen (N) content, usually between 7 to 8 times less. The rest of the cultivation (plant maturation, seed harvest) is the same as for plants not grown under abiotic stress. Growth and yield parameters are recorded as detailed for growth under normal conditions.

[0995] Four T1 events were further evaluated in the T2 generation following the same evaluation procedure as for the T1 generation but with more individuals per event. From the stage of sowing until the stage of maturity the plants were passed several times through a digital imaging cabinet. At each time point digital images (2048×1536 pixels, 16 million colours) were taken of each plant from at least 6 different angles.

### 49.2 Statistical Analysis: F-Test

[0996] A two factor ANOVA (analysis of variants) was used as a statistical model for the overall evaluation of plant phenotypic characteristics. An F-test was carried out on all the parameters measured of all the plants of all the events transformed with the gene of the present invention. The F-test was carried out to check for an effect of the gene over all the transformation events and to verify for an overall effect of the gene, also known as a global gene effect. The threshold for significance for a true global gene effect was set at a 5% probability level for the F-test. A significant F-test value points to a gene effect, meaning that it is not only the mere presence or position of the gene that is causing the differences in phenotype.

### 49.3 Parameters Measured

### Biomass-Related Parameter Measurement

[0997] From the stage of sowing until the stage of maturity the plants were passed several times through a digital imaging cabinet. At each time point digital images (2048×1536 pixels, 16 million colours) were taken of each plant from at least 6 different angles.

[0998] The plant aboveground area (or leafy biomass) was determined by counting the total number of pixels on the digital images from aboveground plant parts discriminated from the background. This value was averaged for the pictures taken on the same time point from the different angles and was converted to a physical surface value expressed in square mm by calibration. Experiments show that the aboveground plant area measured this way correlates with the biomass of plant parts above ground. The above ground area is the time point at which the plant had reached its maximal leafy biomass. The early vigour is the plant (seedling) aboveground area three weeks post-germination. Increase in root biomass is expressed as an increase in total root biomass (measured as maximum biomass of roots observed during the lifespan of a plant); or as an increase in the root/shoot index (measured as the ratio between root mass and shoot mass in the period of active growth of root and shoot).

### Seed-Related Parameter Measurements

[0999] The mature primary panicles were harvested, counted, bagged, barcode-labelled and then dried for three days in an oven at 37° C. The panicles were then threshed and all the seeds were collected and counted. The filled husks were separated from the empty ones using an air-blowing device. The empty husks were discarded and the remaining fraction was counted again. The filled husks were weighed on an analytical balance. The number of filled seeds was determined by counting the number of filled husks that remained after the separation step. The total seed yield was measured by weighing all filled husks harvested from a plant. Total seed number per plant was measured by counting the number of husks harvested from a plant. Thousand Kernel Weight (TKW) is extrapolated from the number of filled seeds counted and their total weight. The Harvest Index (HI) in the present invention is defined as the ratio between the total seed yield and the above ground area (mm²), multiplied by a factor 106. The total number of flowers per panicle as defined in the present invention is the ratio between the total number of seeds and the number of mature primary panicles. The seed fill rate as defined in the present invention is the proportion (expressed as a %) of the number of filled seeds over the total number of seeds (or florets).

### Example 50

### Results of the Phenotypic Evaluation of the Transgenic Plants

[1000] The results of the evaluation of transgenic rice plants expressing the nucleic acid sequence useful in performing the methods of the invention are presented in Table 0. The percentage difference between the transgenics and the corresponding nullizygotes is also shown, with a P value from the F test below 0.05.

[1001] Total seed yield, number of filled seeds, seed fill rate, harvest index and thousand kernel weight are significantly increased in the transgenic plants expressing the nucleic acid sequence useful in performing the methods of the invention, compared to the control plants (in this case, the nullizygotes).

TABLE O
Results of the evaluation of transgenic rice plants expressing the nucleic
acid sequence useful in performing the methods of the invention.

| | % Increase | % Increase |
|---|---|---|
| Trait | (T1 generation) | (T2 generation) |
| Total seed yield | 20 | 23 |
| Number of filled seeds | 17 | 19 |
| Fill rate | 12 | 20 |
| Harvest index | 15 | 20 |
| Thousand Kernel Weight | 2 | 4 |

The application's sequence listing, which the Patent Office published only in electronic form, follows.

SEQUENCE LISTING (347 sequences)

SEQ ID NO: 1 - DNA, 2151 bp, Arabidopsis thaliana
atgtgctgtggatcagaccgattaaaccagatcgtgtcatcaagatcttcgttgccaatttctttcgaggaagataacaatcttgttaccaacacagacatgaatcacttaacagtcgaaacagaggatacgtttgcgagcttgcttgagcttgcagctaacaacgatgttgaaggtgtaaggctatctatcgagagagacccttcttgtgtagacgaagctggtctctggtacggtcgtcaaaaaggttctaaagctatggtcaacgattacaggactccgttgatggttgctgctacttacggaagcattgatgtgatcaagcttattgtttctttgactgatgctgacgtgaaccgtgcttgcgggaatgatcagaccactgcgttacactgcgctgcttctggaggagctgtgaatgctatccaagttgttaagctgcttcttgcagctggagctgatttgaatctgttggatgctgaaggtcaacgagctggtgatgttattgttgttcctcctaagcttgaaggcgtgaagctgatgcttcaggagcttctttctgctgatggatcatctactgcggagcggaatctacgggttgtgacaaatgttccgaatagaagctcatctccgtgtcattctcctactggagagaatggtggatcagggtctggttcaccgctcggctctccttttaagctgaaatctactgaattcaagaaagagtatccggttgatccgtctttgccagatatcaagaacagtatctacgcgactgatgagtttagaatgtattccttcaaggtccggccttgctctcgtgcttattcacatgattggactgagtgtccttttgttcacccgggtgaaaacgcgaggaggagagacccgaggaagttccattacagctgcgttccttgcccggattttaggaaaggagcttgtaggagaggagatatgtgtgagtatgcgcacggtgtgtttgaatgctggcttcatccggctcagtacaggacccgtctttgcaaagatggaacaggctgtgctcggcgggtttgtttctttgcgcatacacccgaggagcttcgacctttgtacgcatcaactggttcagcggttccttcgcctagatcgaatgctgattatgcagctgctttgagtctccttcctggttctccatcaggagtctctgtcatgtccccgctttccccatcagcagcggggaacggaatgtctcattcgaatatggcttggccacaaccaaatgtccctgcgttgcacttaccaggaagcaatctacagtcaagcaggctaaggtcttctctcaatgcaagggatatcccgacggatgagttcaatatgttagcggattacgagcagcagcaactcctcaacgagtattccaatgctctgagccgttctggtcggatgaaatcaatgcctccttcgaatcttgaagatcttttctcagcagaaggctcttcatctccccggttcactgattccgctttagcttccgcggtgttctcgcctacacacaagtcagctgtcttcaaccagttccaacaacagcaacagcagcagcagagcatgttgtctccaatcaacacaagcttttcttcaccaaagagcgttgaccactcattgttttcaggtggaggaagaatgtctcctcggaatgttgttgaaccaatatcacccatgagtgctcgggtttccatgttggctcagtgcgtgaagcaacaacaacagcaacagcagcagcagcagcagcaacatcagttccgtagccttagctccagagagctcagaacaaactctagcccaatcgttggttcaccggtaaacaacaacacatggtcatcaaaatggggatcttcaaatggtcaaccggattggggaatgagctcagaagcacttggtaagttgagatcttcgtcatcgtttgatggtgatgagcctgatgtgtcatgggtccagtcactggtgaaggagactccagcagaagccaaagagaaagcagcaacatcttcctcaggggaacacgtgatgaagcagccaaatccggttgaaccggtaatggatcatgctgggctagaagcttggattgagcaaatgcagctcgatcagcttgtggctcagcagaattga

SEQ ID NO: 2 - protein, 716 aa, Arabidopsis thaliana
MCCGSDRLNQIVSSRSSLPISFEEDNNLVTNTDMNHLTVETEDTFASLLELAANNDVEGVRLSIERDPSCVDEAGLWYGRQKGSKAMVNDYRTPLMVAATYGSIDVIKLIVSLTDADVNRACGNDQTTALHCAASGGAVNAIQVVKLLLAAGADLNLLDAEGQRAGDVIVVPPKLEGVKLMLQELLSADGSSTAERNLRVVTNVPNRSSSPCHSPTGENGGSGSGSPLGSPFKLKSTEFKKEYPVDPSLPDIKNSIYATDEFRMYSFKVRPCSRAYSHDWTECPFVHPGENARRRDPRKFHYSCVPCPDFRKGACRRGDMCEYAHGVFECWLHPAQYRTRLCKDGTGCARRVCFFAHTPEELRPLYASTGSAVPSPRSNADYAAALSLLPGSPSGVSVMSPLSPSAAGNGMSHSNMAWPQPNVPALHLPGSNLQSSRLRSSLNARDIPTDEFNMLADYEQQQLLNEYSNALSRSGRMKSMPPSNLEDLFSAEGSSSPRFTDSALASAVFSPTHKSAVFNQFQQQQQQQQSMLSPINTSFSSPKSVDHSLFSGGGRMSPRNVVEPISPMSARVSMLAQCVKQQQQQQQQQQQQHQFRSLSSRELRTNSSPIVGSPVNNNTWSSKWGSSNGQPDWGMSSEALGKLRSSSSFDGDEPDVSWVQSLVKETPAEAKEKAATSSSGEHVMKQPNPVEPVMDHAGLEAWIEQMQLDQLVAQQN

SEQ ID NO: 3 - protein, 13 aa, Artificial sequence
  motif 1
  VARIANT (1)..(1): \replace = "Ala"
  VARIANT (7)..(7): \replace = "Thr"
PCSRAYSHDWTEC

SEQ ID NO: 4 - protein, 12 aa, Artificial sequence
  motif 2
HPGENARRRDPR

SEQ ID NO: 5 - protein, 19 aa, Artificial sequence
  motif 3
  VARIANT (3)..(3): \replace = "Ile"
  VARIANT (6)..(6): \replace = "Ser"
  VARIANT (11)..(11): \replace = "Ser"
  VARIANT (14)..(14): \replace = "Lys"
HGVFECWLHPAQYRTRLCK

SEQ ID NO: 6 - protein, 5 aa, Artificial sequence
  motif 4
CFFAH

SEQ ID NO: 7 - DNA, 54 bp, Artificial sequence
  primer: prm06717
ggggacaagtttgtacaaaaaagcaggcttaaacaatgtgctgtggatcagacc

SEQ ID NO: 8 - DNA, 50 bp, Artificial sequence
  primer: prm06718
ggggaccactttgtacaagaaagctgggtggttaggtctctcaattctgc

SEQ ID NO: 9 - DNA, 981 bp, Oryza sativa
aagaggcaagagcatccgtattaaccagccttttgagacttgagagtgtgtgtgactcgatccagcgtagtttcagttcgtgtgttggtgagtgattccagccaagtttgcgatggcttctcagcaggaacgggctagctaccacgccggcgagaccaaggcccgcgccgaggagaagacggggcgcatgatgggcacggcgcaggagaaggcgcgggaggccaaggacacggcgtccgacgccgcggggcgcgcgatgggcaggggacacggcgccaaggaggcgaccaaggagaaggcgtacgagaccaaggacgcgaccaaggagaaggcgtacgaggcaaaggacgcggcctccgacgccaccggccgcgccatggacaagggccgcggcgccgcgggcgccacgagggacaaggcgtacgatgccaaggacagggcggctgacacggcgcagtccgccgccgaccgcgcccgcgacggcgccgggcagaccgggagctacattggacagaccgccgaggccgccaagcagaaagcggccggcgccgcgcagtacgccaaggagaccgcgatcgccggcaaggacaagaccggcgccgtgctccagcaggcaggggagcaggtgaagagcgtggcggtgggggcgaaggacgcggtgatgtacacgctcgggatgtcaggcgataacaagaacaacgccgctgccggcaaggacaccagcacctacaagcctggaactgggagtgactaccagtaatacggtagaagaagcatgtgtcgtctttggcactgatgccaaagtgtacgtgttgtatcctcttttttaagtttcagctcgacttcgacgtgttcggtgtcacactttggtttttcagttgtgctcaactgttcatgtttctggttccatggagggccagtgtggaggtcaatgtttaagctttcgttttaaaatctgataataaagttggttaagacctg

SEQ ID NO: 10 - DNA, 3372 bp, Eucalyptus grandis
ggaagacgaagagcaacaaaataggtctcactccctcctctctcctctctcctctctcttctttctctctcttctgcttctaacaaagtctcttccttgagagacagggctgcgtcgtcgtctttctctctcctcgctgcgagcttctgagaaagttcaattctttttctcttgttctctctctctacccttctgggtaccactgtgaagctccggtcttttctattttttttttttttgggctatctgggtctgggcaaatccatcgcgcgctctgctctggactgagaggccgtcagtggctttagatctgcgacgcctcttgcttgctcagtgagctgggctagttcaaatcgacgaagaaagcatgcgctagtgattggtgtgggtaatacactgcattcgatctctactaagtatccccaagtatactaagatcccgttctcagccatgagtcaactgaccattcagactgaggacacttttgccagcttgcttgagcttgctgctaacaacgacacagaatctttcggacggtgtgtggaacgtgatccttcgagcatagatgaaattggatattggtatggtcgccaaaagggttcgaagcaggtggtcaatatgcaaagaactcctcttatggtggctgctacatatggtagtgttgatgtaatgagactcattctttgcctatctgatgctgatgtgaatcgaacctgcagcacagacaagagcacagcccttcactgtgctgcctctggtggtgctgtgaatgctgtagatgctgtgaggctactcctgtcagctggtgctgacccaagtttagcagatgctaacggtcagcggcctgtggatgttattgttgttcctccaaagctcctttcaataaagtttgctcttgaagagctcttgtcgaccgaaggatctgtaaatgaacacaatctgagagtgtccgtagccacttccaattcaacctctcccccactttcatcttccccggataatggttccccagcatctgctaattgttcttcccccaagaactcaaagttaagtgatgcccctgttctttatgcatcagaaaagaaggaatacccggtggatccatctcttccagatatcaagaatagcatttactcaacagatgaattccgaatgtattcttttaaagtgcggccttgttcacgagcgtactcgcatgattggacggagtgcccttttgttcatccaggggagaatgcccgtagaagggatccaaggaagttccactacagctgtgtcccttgccctgatttccggaagggtgcttgtagacgtggagatatgtgtgaatatgctcatggtgtttttgagtgctggctccatcctgctcagtatcggactcgattatgcaaggatggtacaagttgtgctcggagagtgtgcttctttgcccacacggagcaagagctgcgtccattgtacgtctccactggttctgctgttccgtctcctcgctcgagtacctctggagctgctgccatggattttgctgcagccatgagcctcttacctggttccccatcatcagtatccatcatgtccccttcacccttcactcctcccatgtctccatctgctaatggtatttctcacccatctgttgcctggccccagcaaaatgtaccaactttgcatcttcccggaagcaatcttcagtccagccgcttgagatcttctcttaatgcaagagatattcctcaggaggattttgacttgctgtcagattatgatgtgcaacagcagcagctcctaaatgagttttccatcctttcacaacaatcgatgggtgctaattccttgaaccgttctggtcggctgaaaactttgaccccctcaaaccttgatgatctcttctctgctgagagctcatcccctcgctacgctgatcaagccctggcttctgctgttttttcaccaacgcacaaatctgcagtaatcaatcaatttcagcagcagcagcagagcatgttatcacccatcaacacaaccttctctcctaagagtgtcgaccaccctttgttgcaagcgtctttcggtgttcaatctgggcgaatgtcccctcgtaacatggatcccatctctcctataagttctcgtgtgtcgatgttggcccaacgagagaaacagcaacagcaattacgcagcctaagctctcgtgaactcggttccaattcagccgccattgtgggttcccccgtgggttcttggtcgaaatggggagctacaaatgggaaaccagactgggctgttagtgcagatgaactaggtaagcttcgcaggtctaattcatttgagcttgggaacaatggtgaggagccagatctttcatgggttcaatccctcgttaaagaatctcctaccgagatgaaagaaaagctttcgtcaactctctctggtgttccagcccccgctacatccagtgaggttccgagtatcagctcgcagatggaatcggttgatcacgaagtgctaggagcatggctccagcagatgcagctcgatccgctcgtggctcagcaaaactaggttgttttttttcctacatggccttgaggaagtagacagcggaaagttttttttggtaaatactatgttttttctggaaatttttgatgctgggggtggggtctggaagaagataacaaggcaggaaaggggtcagtgaagtcactggagaaaaggaattcatttttaaccattttatcattctattacaacagaaagtagggaaaaaaaaggaagaccctctgggttatgaagagaaattaaacccaggctaggcgttctcctttctaatatttccaattttaggtccatattactgtcatttcctttttgccgtcttatcatatttcatcaaaatggaactggggactaatgtttgttccattctttcgctcttctgatttatttgcacccttggggtaagatcaaaagagaaattatgatcattttcttttgaggatatttttttttcccaatatttgtgagaatgaaagttaagaggggatatgatgtgtctggtgttgtagtatgaaaaaccaataaccgagttcacctgttgctgctggtggtagaagaagtggagaagaagctatgatcctttgatgtaacagtcaatcaaacattttaatacctttattttttgtttcctcatgtaatccatcctttgtgattgtcctctctctctctctctctctctctctctccctccccgtgttctttcttcataagcgtcttgcttgtcgatctgtaaattattgaaaagggtcatggaaagccgtgccggtgtggattctcatttttgcaaaaaaaaaaaaaaaaaaaaaaaa

SEQ ID NO: 11 - protein, 704 aa, Eucalyptus grandis
MSQLTIQTEDTFASLLELAANNDTESFGRCVERDPSSIDEIGYWYGRQKGSKQVVNMQRTPLMVAATYGSVDVMRLILCLSDADVNRTCSTDKSTALHCAASGGAVNAVDAVRLLLSAGADPSLADANGQRPVDVIVVPPKLLSIKFALEELLSTEGSVNEHNLRVSVATSNSTSPPLSSSPDNGSPASANCSSPKNSKLSDAPVLYASEKKEYPVDPSLPDIKNSIYSTDEFRMYSFKVRPCSRAYSHDWTECPFVHPGENARRRDPRKFHYSCVPCPDFRKGACRRGDMCEYAHGVFECWLHPAQYRTRLCKDGTSCARRVCFFAHTEQELRPLYVSTGSAVPSPRSSTSGAAAMDFAAAMSLLPGSPSSVSIMSPSPFTPPMSPSANGISHPSVAWPQQNVPTLHLPGSNLQSSRLRSSLNARDIPQEDFDLLSDYDVQQQQLLNEFSILSQQSMGANSLNRSGRLKTLTPSNLDDLFSAESSSPRYADQALASAVFSPTHKSAVINQFQQQQQSMLSPINTTFSPKSVDHPLLQASFGVQSGRMSPRNMDPISPISSRVSMLAQREKQQQQLRSLSSRELGSNSAAIVGSPVGSWSKWGATNGKPDWAVSADELGKLRRSNSFELGNNGEEPDLSWVQSLVKESPTEMKEKLSSTLSGVPAPATSSEVPSISSQMESVDHEVLGAWLQQMQLDPLVAQQN

SEQ ID NO: 12 - DNA, 1860 bp, Oryza sativa
atgggggagcctgggggcgccgaggcggccgtctccgcgaggctgctcgagctggcggccgacgacaacgcggcggggctcggggagctcctcgcggcgtggccctccctcgccgacgagcccgcgccgtggtacaccccggcgcggggcgcggagccgctgaccccgctcatggtcgccgccgtgtacggctcggtgggctgcctcgacgcgctcctctcgccgccctacctcgtggaccccaaccgcgcctcggcgtcgtcgctctccaccccgctccacctcgccgccgcgggcgggtccgcctccgcccccgcggcggtctcccgcctcctcgccgccggcgccgacccggccctcctcgaccacctccagcgccgggcgtccgacctcgtcgcgctcccgcccaactcgctcccgctcaagaaccacctcctctccctcctcggcgcccgcaaggagtggcctcccgacccctccctccccgacatcaagaacggcgcctacgcctccgacgacttcaggatgtactcgttcaaggtgcgcgcgtgctcgcgggcctactcccatgactggacggagtgccccttcgtccaccccggcgagaacgcgcggcggcgcgacccgaggaagtaccactacagctgcgtgccgtgcccggagttcaagaagggggccgggtgcaggagaggggacatgtgcgagtacgcgcacggggtgttcgagagctggctccacccggcgcagtaccggacgcgcctctgcaaggacggcgtcggctgcgcccgccgcgtctgcttcttcgcccacacgcccgacgagctccgcccgctctacgtctccacgggctccgccgtgccgtcgccgcgcggggcgttggagatggcggcggcggcggcggcgatggggatggggctgtcgtcgccggggtcgtcgtcgttcacgccgccgctatcgccgtcggccggcgggggcgggggcgggggcgggggcagcggcggcggcggcgcgtggccgcagcagccgagcgtgccggcgctctgcctgcccgggagcgccgggaacctccacctgagccggctgcgcacgtcgctgagcgcgcgcgacatggccgtcgacgagctgctcgccgcggcggcggcggcggcggactacgacggcctcgtcgcctcccccgcctccatccggtccgcgagggggaaggcgcttgtgccgtcaaatctcgacgagctcttctccgctgagctcgccgccgccgcggcgtcgcgctcgccgcgctacgccgaccaaggcggcgccgcgttctccccgacccgcaaggccaccgtgctcaaccaattccagctgcagcagcagcatagcttgctctcgccgcgggcggccgcggtgacaccagagccggtctccccaatgagctcccgcctcctcgccgcgctggcgcagcgggagaagatgcagcagcagacgctgcggagcatgagctcacgggacctcggcaacgccgcgtcgctgctggtcggctcgccggtgagctcgagcatgtccaaatgggggttcccctccggcaacccggactggggcgccgacgacgaggagctcggccgcctcaagcgttgctcctcgttcgagctccggtccggagccgccaatggcaaccatgagcctgacctctcatgggtcaacaccctagtgaaggagccgacaccggagaagatgatgacgacgacatcggcaatggattccattggcatcttgggacagaacacaagccgtgatcacatcgtcggaggcgaggatgacactgccggagtcatcagcagctggcttgaacagctccagctcgatgagatggttgtctag

SEQ ID NO: 13 - protein, 619 aa, Oryza sativa
MGEPGGAEAAVSARLLELAADDNAAGLGELLAAWPSLADEPAPWYTPARGAEPLTPLMVAAVYGSVGCLDALLSPPYLVDPNRASASSLSTPLHLAAAGGSASAPAAVSRLLAAGADPALLDHLQRRASDLVALPPNSLPLKNHLLSLLGARKEWPPDPSLPDIKNGAYASDDFRMYSFKVRACSRAYSHDWTECPFVHPGENARRRDPRKYHYSCVPCPEFKKGAGCRRGDMCEYAHGVFESWLHPAQYRTRLCKDGVGCARRVCFFAHTPDELRPLYVSTGSAVPSPRGALEMAAAAAAMGMGLSSPGSSSFTPPLSPSAGGGGGGGGGSGGGGAWPQQPSVPALCLPGSAGNLHLSRLRTSLSARDMAVDELLAAAAAAADYDGLVASPASIRSARGKALVPSNLDELFSAELAAAAASRSPRYADQGGAAFSPTRKATVLNQFQLQQQHSLLSPRAAAVTPEPVSPMSSRLLAALAQREKMQQQTLRSMSSRDLGNAASLLVGSPVSSSMSKWGFPSGNPDWGADDEELGRLKRCSSFELRSGAANGNHEPDLSWVNTLVKEPTPEKMMTTTSAMDSIGILGQNTSRDHIVGGEDDTAGVISSWLEQLQLDEMVV

SEQ ID NO: 14 - DNA, 2106 bp, Medicago truncatula
atgaaaaatctaactgttcgtactgatgattctttttccagcttacttgaacatgcttctaacaatgattttgaagatttcaaggtagctctagatagtgatgcttcacttattaatgaagttggcttctggtatgtccgtcaaaagggatctaaccaaattgttcttgagcaccgaacccctttaatggtggctgcttcctatgggagtattgatattctaaagcttatactctcatatcccgaggctgatgttaatttctcctgtggaactgataaaagcactgctcttcactgtgctgcctcaagtggttcagttaatgctgttgatgctataaaattgcttttatcagctggtgctgatatcaattctgtggatgctaatgggaaacgccctgtggatgttatcgttgttcctattgttgttcctcataagctcgaaggtgttaaaacaattcttgaagaacttctctcagacagtgcttctgaaggatctgtggatgattgctctcttcccctgtctcttatttcatcgagtcctggttcatctgcccctttatcatctgctgaaaatggatctccatcctctcctgtggctcccaagtttacagatacagctgttaattctacatcagaaaagaaagagtatccagttgacccatctcttcctgacataaaaaacagcatgtatgccacagatgaattccgcatgtattcattcaaggttcgtccttgttctcgtgcatactctcatgattggactgagtgtccttttgtgcatcctggagagaatgctcgaaggagagaccctagaaagtttcactacagctgtgtgccatgccctgattttaggaaaggggcttgccgacgttcggatatgtgtgaatatgctcatggagtattcgagtgctggctacacccagctcagtatcggacaaggctgtgcaaagacggtatgggttgtaaccgaagggtgtgcttcttcgctcactcacctgaagagctgcgtccgctgtatgtgtccactggttctgctgttccttcaccccgatcagctgcttctactgctaatgtcatggacatggctgctgctatgagccttttccctggttcaccatcatcaatctctttgatgtctcaatcaccctttgcacagcctcctctatctccatctgcaaatggcaataatgcttggccacagcccaatgtgccagctcttcatttaccaggaagcattaatcaaactagtcgtttgagatcttctcttagtgcccgtgatatgccacacgacgacttcaacaatatgttgcaagactttgatgggcagcagcagatactaaatgacttgagctgtttctcacagccccgtcctggtgctatttcagttggtcgatctggccgccctaaaacactaactccctcaaatctggatgatcttttttgtgctgagattgcttcatctcctaggtattccgaccccgctgcggcttctgtattttccccaacacacaaatctgctgtcttcaaccagtttcaacagcttcaaagctccttatcacccatcaacacaaatgtcatgtctcctacaaacgtagagcatcccctgttccaccaggcttcatatggtctctcttctcctggaaggatgtcaccaagaagtatggaagccctatctccaatgagttctcggctgtcagcttttgctcagcgtgagaaacaacagcagcagcagcaacagctgcgtagcctcagctcaagagaactcggtgctaacaatcctctctcagctgttgggtcccctgttaactcctggtccaagtggggatcatcccctattggaaaagctgattggtcggtaaatccaaatgacttcggtcaaacacagagatcaacttcttttgagcatggaaacaatggagaagagcctgatgtaggttgggtccattcccttgtcaaggatcccacacctgagaagaaagagaagcttgcaggttccggcccaattccatccgttgaaaagaatcccaatcctcaagcggacggcattgatcactctgttttgggagcttggctcgagcaactgcagctggatcaacttgtagtctag

SEQ ID NO: 15 - protein, 701 aa, Medicago truncatula
MKNLTVRTDDSFSSLLEHASNNDFEDFKVALDSDASLINEVGFWYVRQKGSNQIVLEHRTPLMVAASYGSIDILKLILSYPEADVNFSCGTDKSTALHCAASSGSVNAVDAIKLLLSAGADINSVDANGKRPVDVIVVPIVVPHKLEGVKTILEELLSDSASEGSVDDCSLPLSLISSSPGSSAPLSSAENGSPSSPVAPKFTDTAVNSTSEKKEYPVDPSLPDIKNSMYATDEFRMYSFKVRPCSRAYSHDWTECPFVHPGENARRRDPRKFHYSCVPCPDFRKGACRRSDMCEYAHGVFECWLHPAQYRTRLCKDGMGCNRRVCFFAHSPEELRPLYVSTGSAVPSPRSAASTANVMDMAAAMSLFPGSPSSISLMSQSPFAQPPLSPSANGNNAWPQPNVPALHLPGSINQTSRLRSSLSARDMPHDDFNNMLQDFDGQQQILNDLSCFSQPRPGAISVGRSGRPKTLTPSNLDDLFCAEIASSPRYSDPAAASVFSPTHKSAVFNQFQQLQSSLSPINTNVMSPTNVEHPLFHQASYGLSSPGRMSPRSMEALSPMSSRLSAFAQREKQQQQQQQLRSLSSRELGANNPLSAVGSPVNSWSKWGSSPIGKADWSVNPNDFGQTQRSTSFEHGNNGEEPDVGWVHSLVKDPTPEKKEKLAGSGPIPSVEKNPNPQADGIDHSVLGAWLEQLQLDQLVV

SEQ ID NO: 16 - DNA, 2841 bp, Oryza sativa
atgaacggcacgccgatctccgcgtccgccgcggccggcgtcgacggagtcggcgcggcggtggcgctggcggccgcgaccaagaagagtgccgccgcggcggccgccgtcgccgagatggcgaaaaccctcaccgtcgacacggacgacgccttcgcggggctcctcgagctcgccgcggacgacgacgcggagggcctgcgccgcgcgctggagcgcgccccgcccgccgccgcggacgaggcgggcctctggtacggccgccgcaaggtcctcgagcaccgcacgccgctgatggtcgcggccacctatggcagcctcgcggtgcttcgcctgctgctgtccctcccgtccgtcgatgtcaatcgccgctgtggctccgacggcaccaccgccctccactgtgcggcgtctggtggctcgccgtcttgtgtggaggccgtcaagctgctgcttgctgctggggctgatgctgatgccacggatgcttccggatatcgtccagctgatgtgatctctgttcctccaaagatgtttgacgccaagattgccctccaagatcttcttggatgcccaaaggctgggcatggcgttctccgggtggtgacaagggccgcaaactctatgttgtcacctgtatcatcccctacagcagaagatgcacgatctccatcagctgctgtgatgatgacgacaaagtttgcagatcttccaagggttgtgacatcggaaaagaaagaatatccagtggatccgtcccttcccgatatcaagaacagcatctatgcttccgatgagttccgcatgtactcatttaagatcaggccatgctcgcgggcgtactcacatgattggactgagtgcccgtttgttcacccaggggagaacgcacggcgtcgggaccctcgcaagtatcactacagctgtgtgccatgccccgactttagaaagggagtttgccggcgtggtgacatgtgtgaatatgctcatggcgtgttcgagtgttggctccatccagcacagtaccgtactcgcctttgcaaggatggcacaagctgtaatcgccgtgtctgtttctttgcgcatacaactgatgagctccgaccactatatgtttccactggatctgcagtaccatccccaagagcctcggcaacagctacaatggagatggctgcagcaatgggcttgatgcctggttctccatcatcagtttcagcagtcatgtccccatttacaccaccaatgtccccttcaggcaatgggatgcccccttcattgggctggcagcagccaaatgttccgacactacaccttccaggcagcagccttcagtcgagccggctccgtacctcacttagtgcaagggatatgcctgctgatgattactccctgatgcaggatattgattcacagcttataaatgatttgtgctattcacgtattggttcatcaacaggaaaccacacgtctcggaccaagtccctaaatccgtcaaacttggatgatctcttctctgctgagatggtctcttccccgaggtatagtaatgctgatcagggtggtatgttttcaccatctcacaaggctgctttccttaatcagttccagcaacagcagcaggcacttctttcaccaatcaacacagtcttctccccgaagtctgtggacaaccagcagttgccttcacactcatctctgttgcaagcatcacttggtatatcctcccctggccgcatgtctcctcgatgtgttgaatctgggtcccctatgaactctcatcttgctgctgctcttgctcagcgtgagaagcaacagcagacaatgagaagtctcagttctcgtgatcttgggccgagtgctgcaagagcatcaggtgttgttggctcccctctaagctcatcatggtcaaagtggggatcaccttcagggacacctgactggggtgttaatggtgaagaattgggcaagcttcgccggtcatcatcgtttgagctgagatctggtggtgatgatccagatctctcttgggtacacacactggttaaggaatctccaccagagaagcaagtcactactgctgaatccataaactctgttggaccttcaccactgatgcctcccagtgtaagcaacggtgaaggtcctagtctgaatgccccgctggatgggcatgaccaagctgctgttattggagcattgcttgaacagatgcagcttgatcagcatattggtagtctagcaacataagcgctgaatgagcctggaaagtgcaaggagttattattcttagttaatgaatttggagtaatttttttcctgttcattaagatggtcagcaagcaaaaggatggatagctgatggtggtgattcagagattggttttctttactttattgaggtaaatcatatacattattgaggttccagtaggttgaaagattgaagtaccttgattggggtcgtttcaagaccgacccaggtagaatcgcaccccggcagcttcaattcatcggtcaaaaatatttccctgttttgttaattaaccccgttaaaaaagaagactcgtttggtgtttcggaattcttttctttaccttagcggtgtttattttgtttattatgatattgatacttgatgtactgatgggtataaggttggttaccaggcatgctatagtggtatatcaagtcccaaagtattctttttctccctttcaccatttgtcgaggatcatactatggccttgttttggtcagatcttgaggcctgtataatccttggatttgtaataatgtaatattgtcattgaacttacattgctattgttttgcaatcgc

SEQ ID NO: 17 - protein, 749 aa, Oryza sativa
MNGTPISASAAAGVDGVGAAVALAAATKKSAAAAAAVAEMAKTLTVDTDDAFAGLLELAADDDAEGLRRALERAPPAAADEAGLWYGRRKVLEHRTPLMVAATYGSLAVLRLLLSLPSVDVNRRCGSDGTTALHCAASGGSPSCVEAVKLLLAAGADADATDASGYRPADVISVPPKMFDAKIALQDLLGCPKAGHGVLRVVTRAANSMLSPVSSPTAEDARSPSAAVMMTTKFADLPRVVTSEKKEYPVDPSLPDIKNSIYASDEFRMYSFKIRPCSRAYSHDWTECPFVHPGENARRRDPRKYHYSCVPCPDFRKGVCRRGDMCEYAHGVFECWLHPAQYRTRLCKDGTSCNRRVCFFAHTTDELRPLYVSTGSAVPSPRASATATMEMAAAMGLMPGSPSSVSAVMSPFTPPMSPSGNGMPPSLGWQQPNVPTLHLPGSSLQSSRLRTSLSARDMPADDYSLMQDIDSQLINDLCYSRIGSSTGNHTSRTKSLNPSNLDDLFSAEMVSSPRYSNADQGGMFSPSHKAAFLNQFQQQQQALLSPINTVFSPKSVDNQQLPSHSSLLQASLGISSPGRMSPRCVESGSPMNSHLAAALAQREKQQQTMRSLSSRDLGPSAARASGVVGSPLSSSWSKWGSPSGTPDWGVNGEELGKLRRSSSFELRSGGDDPDLSWVHTLVKESPPEKQVTTAESINSVGPSPLMPPSVSNGEGPSLNAPLDGHDQAAVIGALLEQMQLDQHIGSLAT

SEQ ID NO: 18 - DNA, 2769 bp, Arabidopsis thaliana
acaccagttaccctctcatccgttttcgttttttttttctctctttcaaaaatctctcagctgaggttgatcgatcttcttcttcttcttcctcactctttagatttgttccttttgcattttacacttttggatctgaaaatgtggttctctgtttcgcccgttaccgtttagattcagttctgtttttttcttacccgatcgcttgattcggactgtgatctttgatcttttttcttctccagtgccgtgaaggatgtgtggtcttgctaagaagctggatatagaggatactttgacatcactgtcagaccaagagaatgaatctttggccaaacccatgaatgatgctgctgaatgggaacattcgttttctgccttgcttgagtttgctgcagacaacgatgtggaggggtttaggcggcaactctctgatgtgtcttgtatcaaccagatgggtctttggtacagacggcagaggtttgttagaagaatggttcttgagcaaagaaccccgctgatggttgcttcgttatatgggagtttagatgttgtgaagtttattctttctttcccggaagcggagttgaatctgtcttgtggtcctgataaaagtactgctcttcattgcgctgcttctggtgcttctgtgaattccttggatgttgtcaagttgcttttgagtgtaggagcagatcctaatatccctgatgctcatggaaatcgtcctgttgatgttcttgttgtgtctccacacgctcctggtttgagaaccatccttgaagagatcttgaagaaagacgagattatatctgaagatctgcatgcctcgtcatctagcttgggatcaagtttccggtctctctcatcatcccctgataatggttcctcgttactctccttagattcagtatcctctccgactaagccacacggtactgatgtaactttcgcatcagagaagaaagagtacccaattgatccatcattgcctgatatcaaaagcgggatttattcaaccgatgagtttcgtatgttctcgttcaagatccgcccatgttctcgagcatattcccatgactggactgaatgtccatttgcacacccaggtgagaatgcaaggagaagagacccgaggaagtttcactatacgtgtgttccatgcccggattttaagaaaggatcctgtaagcaaggtgatatgtgtgaatatgctcatggggtttttgaatgctggctacaccctgctcagtacagaacacgattgtgcaaggacggaatgggttgcaaccgaagggtttgcttctttgctcacgcaaatgaggagttgcgtcccttgtacccttccacaggatctggattgccatctcctcgggcttcgtctgctgtttccgcctctactatggacatggcgtcagttttgaacatgttaccaggctcaccatctgctgctcaacattcgttcaccccaccaatatctccttctggaaatggtagtatgccccattcatcgatgggttggcctcagcagaacataccggcgttgaatcttcctggaagcaatatccagttgagtcgtctgagatcttctcttaacgctagagatattccttctgagcagcttagcatgctgcatgagtttgaaatgcaacgtcagcttgctggcgatatgcacagtccacgctttatgaatcattccgctcgtcctaagacactgaacccttcaaatctggaggaactcttctcagctgaggttgcatctcctcgtttctctgatcaacttgctgtttcatctgttctatcgccttcccacaagtccgcgcttcttaatcagctgcagaataataagcagagcatgctttctcctatcaagacaaatctaatgtcttctccaaagaatgtggagcaacattctcttctgcagcaagcctcgtcaccccgaggcggagagcctatttccccaatgaatgctcgaatgaaacagcagctacattcacgcagcctaagctcccgtgattttggatctagtctgccccgtgatttaatgccgactgattctggttcgccattaagtccatggtcaagttgggaccagacccatggaagcaaggtggattggtcagtccaatcagatgagttaggtcggttgagaaaatctcattccttggctaataacccaaacagggaagcagatgtttcatgggctcagcagatgttaaaagactcttcatcacctaggaacggaaaccgtgttgtgaacatgaatggtgcaaggccattgactcaaggtggttcgagtgtgaatcctcacaacagtgacactcgtgagagcgacattcttgatgcgtggcttgaacagctgcacctagatcgctgagcctcagctgcgagagagaggttcacatttctgtgaagctgtgaaactgatgattcgtttatttattattcaagaaagcaaacggaaacaaaagcaaactccgggtaagcttttttcgattctaataaccctaaaaggctcagttttttcaggcttctttctgaaatttctttactttcttatttttatcacctcattaaattaattattgtatcatctctgttgtaacaatggccaaagtgcgcctctattacttcccggatttctgatttacattttttgtatcctctcagtttgtcaattgtttctaatatctccttcatatttgtcaaagaacactgtatgagaaataataacatattgtttcagctaataagattcattcatttcct

SEQ ID NO: 19 - protein, 706 aa, Arabidopsis thaliana
MCGLAKKLDIEDTLTSLSDQENESLAKPMNDAAEWEHSFSALLEFAADNDVEGFRRQLSDVSCINQMGLWYRRQRFVRRMVLEQRTPLMVASLYGSLDVVKFILSFPEAELNLSCGPDKSTALHCAASGASVNSLDVVKLLLSVGADPNIPDAHGNRPVDVLVVSPHAPGLRTILEEILKKDEIISEDLHASSSSLGSSFRSLSSSPDNGSSLLSLDSVSSPTKPHGTDVTFASEKKEYPIDPSLPDIKSGIYSTDEFRMFSFKIRPCSRAYSHDWTECPFAHPGENARRRDPRKFHYTCVPCPDFKKGSCKQGDMCEYAHGVFECWLHPAQYRTRLCKDGMGCNRRVCFFAHANEELRPLYPSTGSGLPSPRASSAVSASTMDMASVLNMLPGSPSAAQHSFTPPISPSGNGSMPHSSMGWPQQNIPALNLPGSNIQLSRLRSSLNARDIPSEQLSMLHEFEMQRQLAGDMHSPRFMNHSARPKTLNPSNLEELFSAEVASPRFSDQLAVSSVLSPSHKSALLNQLQNNKQSMLSPIKTNLMSSPKNVEQHSLLQQASSPRGGEPISPMNARMKQQLHSRSLSSRDFGSSLPRDLMPTDSGSPLSPWSSWDQTHGSKVDWSVQSDELGRLRKSHSLANNPNREADVSWAQQMLKDSSSPRNGNRVVNMNGARPLTQGGSSVNPHNSDTRESDILDAWLEQLHLDR

SEQ ID NO: 20 - DNA, 2674 bp, Oryza sativa
tgcgagtcctcctcctcttctcgtcgccgtgctactctcgctttctctctctctctctctcacttgttccccaaggcgagaagcagccgccgccggcgagcgtcgcgggggaggggagggaagggagggaggagcggtggatccgggcttgattggattgggtcggattcgattttggatcaaccccggagggcgggagcggttgctacagatgcgttgagctttggttaatctatccggcgagagataatgggcgagcttgctgatctcgttgtcgtgccgtcgcagccgccgctcgccggcggccggcgggacaggctggcggcgctgctggagctcgcggcggcggatgatgttgatgggctcaggggggcgctcgcggagggaggcgaggaggcggcggagttggctgatggggtcgggctgtggtatggtcggagcaaggcgtacgaggcgcgcacgccgctgatggtggcggcgacgtacggcagcgccggggtggtctcgctgctggtgggcctcggcggttgcgtcgacgtcaaccgtcgccctggagccgacggcgccaccgcgctccactgcgccgcctccggtggctcgcgcaacgccgtcgctgttgtcaagctgcttttggccgctggcgccgatccggccacccccgattccgccggccgcttccccgccgacgtcatcctagctcctccggcttcgccagatgcccttggcgatctcgaggtgctcctcggccgccgccgagcactcgccgtggcgacctcggtggcttcaggttcgtcatcccctccgctctcgtcctcaccagatgagggcaacaggtcgccctcgtcgcgttcgtcgtcgctgtctcccatcactgtggatcgtgggaagaaggagtatccggtggatccaactctgccggacatcaagagcagcgtgtatgcttcggatgagttccgcatgtttgcgttcaaggtccggccctgctcccgtgcctactcacacgactggactgagtgcccgtttgtgcaccccggcgagaacgcccgccgccgtgatccccgcaagcacccatacactgctgtgccttgccccaactttcgccggcctggtggctgccctagcggcgatagctgtgagttctcgcatggcgtgtttgagagctggctacacccatcacagtatcgcacaaggctctgcaaggagggagcagcttgcgcccgtcgcatttgcttctttgcccatgatgaggatgagctccgccatgtgcctcacaacagtggtgccggcctgctgtctccccgcgcttcttcatccattgatatgactgctgcagctgcgctcgggcttcttccaggttctcctaccagacactttgcaccgccgcctgtgtcaccatctgctgggagcaatggaggagctgctgctgcgcattggctccaaggcagtaggctgcgttcttctttcaatgcaagggatgctgctgttgatgaccttggcatgctcctcgaatgggaatcacaataccttggggcactctgcctgccacccagcagccgcccccaaccacgcctttcagctggtctgagtatcaggccaacaattgctccatccaatcttgaagacatgtatgcttcagacatggcaatgtctccgaggttccctaatgaccaaggtcactcagtctactcaccagcccacaaatcagccctcctcaacaagcttcatcaacagaagggcctcttatcacctgttaacaccaacagaatgtactccccaagggctcttgatccgtcatctttggcacattctccatttggtggcatgtctccccggtccccccgtaccatggaacctacatcacccctaagtgctcgtgtaggagcccctgccacacagcggccttctgttggttcaccacggaattccagtgcttggggcaccgtggggtccccgatgggtaaggttgactggggtgtcgatagcgaggagctagtccgcttgagacgccctgcacaaccagggtttggagaagatgagacagatgtatcatgggtgcagtcactggtaagcaatgctgagcttaatggcaagaggggcgaagtacaaggcatgcctggtacttctgcattgatgaacaggcctgacctgaacaatcagggtgacttgttggaccagacggtgatcggtgcttggcttgagcagatgcacctggatcagaagtgatttccaagggaagccatgaagtcccaaagtggatgaagcctttattttgccaaggttatttaccaaagaatagttgttggtcctagtaaataataatttattctttttaattcttgaaatttttggtgggcaaagtcagagatggtggtcaagttcaacaaaacatttggtcacagattggtagctgaaatcagttccagagattggtaaacaacctcattacttggggtcctaactagtattcttttgattagctcagatgagtctttattttagtgggttaaaattcatatgttccccatggttattatgtccatgatctcttcctaacaaaagagagattataattgtccatttttcatttatcaatgaatgattttgttaaaacaatgtaagttacattcttaattttttctctgttcaatggaattaccttccttggttagtcctc

SEQ ID NO: 21 - protein, 657 aa, Oryza sativa
MGELADLVVVPSQPPLAGGRRDRLAALLELAAADDVDGLRGALAEGGEEAAELADGVGLWYGRSKAYEARTPLMVAATYGSAGVVSLLVGLGGCVDVNRRPGADGATALHCAASGGSRNAVAVVKLLLAAGADPATPDSAGRFPADVILAPPASPDALGDLEVLLGRRRALAVATSVASGSSSPPLSSSPDEGNRSPSSRSSSLSPITVDRGKKEYPVDPTLPDIKSSVYASDEFRMFAFKVRPCSRAYSHDWTECPFVHPGENARRRDPRKHPYTAVPCPNFRRPGGCPSGDSCEFSHGVFESWLHPSQYRTRLCKEGAACARRICFFAHDEDELRHVPHNSGAGLLSPRASSSIDMTAAAALGLLPGSPTRHFAPPPVSPSAGSNGGAAAAHWLQGSRLRSSFNARDAAVDDLGMLLEWESQYLGALCLPPSSRPQPRLSAGLSIRPTIAPSNLEDMYASDMAMSPRFPNDQGHSVYSPAHKSALLNKLHQQKGLLSPVNTNRMYSPRALDPSSLAHSPFGGMSPRSPRTMEPTSPLSARVGAPATQRPSVGSPRNSSAWGTVGSPMGKVDWGVDSEELVRLRRPAQPGFGEDETDVSWVQSLVSNAELNGKRGEVQGMPGTSALMNRPDLNNQGDLLDQTVIGAWLEQMHLDQK

SEQ ID NO: 22 - DNA, 2223 bp, Arabidopsis thaliana
ttcttcaaaaaccccaaccacttcttctccccaaaaacctccaaagtttcaatctttacttctctctttttctccaagttatcttcttttctaggaagagatatgtgcggtgcaaagagcaacctttgctcatctaaaaccctaacagaagtcgaattcatgaggcagaaatcagaagacggagcttccgccacgtgtctcctcgaattcgccgcctgtgatgatctttcatcgtttaagagagagatcgaagagaatccatcggtggagattgatgagtcagggttttggtattgcagacgggtcgggtctaagaagatgggttttgaagaaagaacaccacttatggttgctgctatgtatggaagcatggaagtgttgaattacataattgccacaggaagatccgatgtgaacagagtttgcagtgacgagaaagtcactgctcttcactgtgcagtttctggctgttctgtttctatcgttgagatcatcaagatcttgcttgatgcttctgcttcacctaattgtgttgacgctaatgggaacaaaccggttgatttgttggctaaagattctcggtttgttcctaaccagagtagaaaggcggttgaggttttactgaccgggattcatggttcggttatggaagaagaggaggaggaactgaagagtgttgtgactaagtatccagctgatgcatcacttcctgatattaacgaaggtgtttatggaactgatgattttaggatgtttagctttaaggttaagccatgttctagggcttattcacatgattggactgaatgtccttttgttcatcctggtgagaatgcaaggaggagagatcctaggaagtatccttacacttgtgtgccttgtcccgagtttcgtaaagggtcttgtcctaaaggagattcgtgtgagtacgcgcacggtgttttcgagtcttggcttcacccggcgcagtataggacacggctttgcaaagatgagactggttgtgctaggagagtttgtttctttgctcatagacgggatgagttaagaccggttaatgcttctactggttctgcaatggtttcaccaaggtcgtctaatcagtctcctgagatgtctgttatgtctcctttgacgctgggatcatcgccaatgaactctcctatggctaatggtgttcctttgtctccaagaaatggtggtttatggcagaacagagttaatagccttacaccaccaccgttgcagcttaatggtagcagattgaagtcgactttgagtgctagagatatggatatggagatggaacttaggtttcgcggtttggataaccggagacttggtgatctcaagccatccaacctcgaagagactttcggatcatatgactcagcttctgtgatgcaacttcaatcaccaagcaggcattctcagatgaaccactatccgtcttcacctgtgaggcagcctcctcctcatggattcgaatcttcagcagccatggcagctgcagtgatgaatgcaagatcctcagcgtttgcgaaacgcagcttgagtttcaaaccagctccagtagcttctaatgtctccgattggggatcaccaaatgggaagcttgagtggggaatgcaaagagatgagctgaacaagttgaggagaagtgcctccttcggcattcatggaaacaacaacaacagtgtgtcacgccctgctagagactacagtgacgagccagatgtgtcgtgggtgaactcactggtgaaagagaatgcaccagagagagtgaatgagagggttgggaatacggtgaatggtgcagcgagtagagacaagtttaagctgccgtcgtgggcagagcaaatgtatatagaccatgagcagcagattgtggcataagaagcagaaagaaagatgtgggatttatattgcttttgtcttctgggcctctctacacagaatctaacaaatctggcaataattctttgatttgtgtttgacccatagtttggttactagtatatgtttttttatgttctttttttctttgtcattctcttgtccttcgtgacactatgtaatgattaaaagcaaataattgatgcatgagttcaaatgttctttgaaggatccatcttattagctttgtaattgttgtgatatcttaatcttattggttacgtatttcaagtgctttagaaaaaatgggcctaagagattttgggg

SEQ ID NO: 23 - protein, 597 aa, Arabidopsis thaliana
MCGAKSNLCSSKTLTEVEFMRQKSEDGASATCLLEFAACDDLSSFKREIEENPSVEIDESGFWYCRRVGSKKMGFEERTPLMVAAMYGSMEVLNYIIATGRSDVNRVCSDEKVTALHCAVSGCSVSIVEIIKILLDASASPNCVDANGNKPVDLLAKDSRFVPNQSRKAVEVLLTGIHGSVMEEEEEELKSVVTKYPADASLPDINEGVYGTDDFRMFSFKVKPCSRAYSHDWTECPFVHPGENARRRDPRKYPYTCVPCPEFRKGSCPKGDSCEYAHGVFESWLHPAQYRTRLCKDETGCARRVCFFAHRRDELRPVNASTGSAMVSPRSSNQSPEMSVMSPLTLGSSPMNSPMANGVPLSPRNGGLWQNRVNSLTPPPLQLNGSRLKSTLSARDMDMEMELRFRGLDNRRLGDLKPSNLEETFGSYDSASVMQLQSPSRHSQMNHYPSSPVRQPPPHGFESSAAMAAAVMNARSSAFAKRSLSFKPAPVASNVSDWGSPNGKLEWGMQRDELNKLRRSASFGIHGNNNNSVSRPARDYSDEPDVSWVNSLVKENAPERVNERVGNTVNGAASRDKFKLPSWAEQMYIDHEQQIVA

SEQ ID NO: 24 - DNA, 1761 bp, Arabidopsis thaliana
atggaaaaagatagtattatgtgcagtggaccaaagagcaatctctgctcttcaagaaccttaacagaaatcgaatcaaggcaaaaggaagaagaaacaatgcttctcctcgaattcgctgcttgtgatgatcttgactcgttcaagagagaggttgaagagaaagggcttgatttggatgagtcagggttatggtattgcagacgtgtcggttctaagaagatgggtcttgaagaaagaacacctttaatggttgcagctatgtatggaagcataaaggttttgactttcatcgtttccactggaaaatctgatgtgaacagagcttgtggtgaagagagagttactccgcttcactgtgctgttgctggctgttctgtgaatatgattgaagtcatcaatgtcttgcttgatgcttctgctttggttaactctgttgatgctaatgggaatcaacctttggatgtgtttgttcgagtttcgaggtttgtggctagtccgaggaggaaagcggttgagttgttgctgagaggaggaggtgttggaggattgatcgatgaggcggttgaagaagagatcaagattgtctctaagtatccagctgatgcttctttaccggatataaacgaaggggtttatggaagtgatgagtttaggatgtatagctttaaggttaagccatgttctagggcttattctcatgattggaccgagtgtgcttttgttcatccgggagaaaatgcgaggaggagagatccgaggaagtatccttacacttgtgtcccctgtcccgagttccgtaaaggatcatgcccgaaaggagattcttgcgagtatgctcacggggttttcgagtcgtggcttcaccccgcgcagtataaaacccggctttgtaaagatgaaacgggttgtgcaaggaaagtttgtttctttgctcataaacgcgaagagatgagacctgttaatgcttcaactggctctgccgtggctcagtctccgtttagcagcttggagatgatgccagggttgtctcctcttgcttattcttcaggagtttcgactcctccggtttctccaatggctaatggtgttccttcctctccaagaaacggcggatcatggcagaacagagtcaatacccttactccaccggctttgcagctcaatggtggaagcagattgaagtccacactgagcgctagagatatcgatatggagatggagatggaattgagactccgcggttttggcaacaatgtggaagagacgttcgggtcttatgtttcctctccaagtaggaattctcaaatgggtcaaaacatgaaccaacattatccatcttccccggtgagacaaccgccatctcaacacgggttcgaatcttcagcagctgcagcggttgcagtgatgaaagcgagatcaaccgcctttgcgaaacgtagcttgagcttcaaaccagctactcaagcagcaccacagtcgaatctctcggattggggatctccaaacgggaagctggaatggggaatgaaaggagaagagctgaataagatgagaagaagtgtttcctttggaatccatggaaacaacaacaataacgcagctagagactacagggacgagccagatgtgtcatgggttaactctttagttaaagacagtactgtggtgtctgagagaagctttggaatgaatgagagggttcggataatgtcgtgggctgagcaaatgtacagagagaaggagcagactgtggtgtaa

SEQ ID NO: 25 - protein, 586 aa, Arabidopsis thaliana
MEKDSIMCSGPKSNLCSSRTLTEIESRQKEEETMLLLEFAACDDLDSFKREVEEKGLDLDESGLWYCRRVGSKKMGLEERTPLMVAAMYGSIKVLTFIVSTGKSDVNRACGEERVTPLHCAVAGCSVNMIEVINVLLDASALVNSVDANGNQPLDVFVRVSRFVASPRRKAVELLLRGGGVGGLIDEAVEEEIKIVSKYPADASLPDINEGVYGSDEFRMYSFKVKPCSRAYSHDWTECAFVHPGENARRRDPRKYPYTCVPCPEFRKGSCPKGDSCEYAHGVFESWLHPAQYKTRLCKDETGCARKVCFFAHKREEMRPVNASTGSAVAQSPFSSLEMMPGLSPLAYSSGVSTPPVSPMANGVPSSPRNGGSWQNRVNTLTPPALQLNGGSRLKSTLSARDIDMEMEMELRLRGFGNNVEETFGSYVSSPSRNSQMGQNMNQHYPSSPVRQPPSQHGFESSAAAAVAVMKARSTAFAKRSLSFKPATQAAPQSNLSDWGSPNGKLEWGMKGEELNKMRRSVSFGIHGNNNNNAARDYRDEPDVSWVNSLVKDSTVVSERSFGMNERVRIMSWAEQMYREKEQTVV

SEQ ID NO: 26 - DNA, 2709 bp, Eucalyptus grandis
cttctgaaagctttttgacttaagacgagagagaaggagagaaggtccccctcctcgtcctcgtccccccgtggattttgaagaagaaaagtcgcaccttccttctcctttcccactcctccctctgctcgaagcttttctcttccgcagaattacataaaaacctcgactttgcgcatcattccgattcacctcacaccttcactttcccactcgaggtctcccccctcttttcctagctctttccctttccctccctctctctcgagaatcgccgcatttggaggagctccaatctgctttgctttgctttgctctcttcttgctcggttccccctcataaggagtcgattatgtgcaacggttcttcgaagggtaaacttttcccctcgagtatgggcatggagggcgaattccacaacaaggatggcgaagcaccccgtaaatgctctgccttgcttgaattggcagcctcggacgatctctcgtcgttcaaaagtgaagtggaagagaagggctgcgacgttgatgaggccagcttttggtatggtaggagaatcgggtcgaagaagatgggttttgaagagaggactccattgatgatctctgctttgtttggaagcaccaaggtcttgaaatacataatcgagaccgccagagctgatgtcaacaggtcttgtgggtccgacaaggtggccgccctccattgcgcagccgcgggtgggtccagttcttcacttgaaattgtgaagctcttgattgaggcctcagcggatattaattctgtagatggcaatggaaataggcccatcgacgtgcttgccccggcagggaagtctcgctgcaattccagaaataagtttgttagatcgttgctgaaaggtgaaaactatgtcgtggaaggtgaccaatcctttgacatagaaggagaggagaagctagtcgctcttccaaaggagggaggcgagaagaaagagtatcctgttgatgtctctctacctgacataaacaatgggttctacagtaccgatgagttccggatgtatgctttcaaggtgaagccttgctcgagggcttactcccacgactggaccgagtgcccgtttgtgcaccctggggagaacgcgaggaggagggacccacgcaagtacccttacagctgtgtcccttgtcctgagtttcgcaagggttcgtgcgtaaggggggatgcttgtgagtatgctcatggagtctttgagtcgtggcttcacccagcgcaataccgaacccggctgtgcaaggatgaaactggttgtactcgcaaagtttgcttctttgctcacaagtccgaagaattgcgtcccgtgtatgcttccacaggttctgctatgccctcacccaagtccttttcagctaatgccctagacatgacaaccctgagccccttatcccttaattcaccatctctgcctttgcctgctacttccacgccccccatgtcacctttggctgcctcatcttcacccaagggcatgaacttgtggcataacaaaattaacctgaccccaccaagcctgcagcttcctggcagccggctgaagacggctatgagtgcgcgggacttcgattttgagttggaatttcttgggctggaaaagcaagcttctcagcggcagcaactgatagaagagatttctcgtctctcatcgccctctcatatgtggaactcggaatttggcagaaccgcagagctgaagcccactaaccttgatgatgcgtttggatctcttgacacttctcttttgtctccgttgcaggggtcgtcgatgaaaacatcgactcctacccagttgcaatcccccacagggcttaaaatttcgaatttgaaccaactccgtgcgagctacccgtctagcagcttgtcgtcctctcctgtgaggaagacctcttcttttgggttcgactcatccagtgcagttgctgcagcagtcatgaactcacggtctgctgctatgacgaagcggagccagagcttcattgaccgtggagcagtgggtcaacggtctggactcattggacctgctaattctgctcctaggatgtccaacctttcggactggggctcgcctgatgggaagttggattggggtgttcaaggggacgagctcaacaagcttaggaagtccgcttccttcggctttagaaacaacagtatggcgaacccaaacaacgtggcgtctcccagtgctgatgagccggacgtgtcgtgggttggttcattggtgaaggatgtggctccgcccgaagggtatccacagtatctgtacatagaacaggagcagatggtggcataactaaagcgaagagcaccacacgaactctctcctgatggcttaagatgacttgtttgacattctttatattcttacaaacagcgcgttcttaggagttagctggaggaaagaaggaaacggtattgagtttgagattcaggctcttagctggacagcgaaaatttggggaaggaagagaatttggtttcttgcccaacttagataatgatgcttttgaaggcttaaaagaaagatgaaggcaaacattcttttgttagtattgtattattgttttaatttttcatcccctctgtcggggtgtggtgggtgtcgatgtttctttcatcagtaaaatatataatgaggtttactcatctattttctactaaaaaaaaaa

SEQ ID NO: 27 - protein, 659 aa, Eucalyptus grandis
MCNGSSKGKLFPSSMGMEGEFHNKDGEAPRKCSALLELAASDDLSSFKSEVEEKGCDVDEASFWYGRRIGSKKMGFEERTPLMISALFGSTKVLKYIIETARADVNRSCGSDKVAALHCAAAGGSSSSLEIVKLLIEASADINSVDGNGNRPIDVLAPAGKSRCNSRNKFVRSLLKGENYVVEGDQSFDIEGEEKLVALPKEGGEKKEYPVDVSLPDINNGFYSTDEFRMYAFKVKPCSRAYSHDWTECPFVHPGENARRRDPRKYPYSCVPCPEFRKGSCVRGDACEYAHGVFESWLHPAQYRTRLCKDETGCTRKVCFFAHKSEELRPVYASTGSAMPSPKSFSANALDMTTLSPLSLNSPSLPLPATSTPPMSPLAASSSPKGMNLWHNKINLTPPSLQLPGSRLKTAMSARDFDFELEFLGLEKQASQRQQLIEEISRLSSPSHMWNSEFGRTAELKPTNLDDAFGSLDTSLLSPLQGSSMKTSTPTQLQSPTGLKISNLNQLRASYPSSSLSSSPVRKTSSFGFDSSSAVAAAVMNSRSAAMTKRSQSFIDRGAVGQRSGLIGPANSAPRMSNLSDWGSPDGKLDWGVQGDELNKLRKSASFGFRNNSMANPNNVASPSADEPDVSWVGSLVKDVAPPEGYPQYLYIEQEQMVA

SEQ ID NO: 28 - DNA, 2518 bp, Eucalyptus grandis
tctccttcgagtttctttcttcactagaattcgctcccgagtctgttgttgctcgtgtagttttgcttactccgtccttcgtttagctcgctgaccagcgcggagctaggagcggtcgctaaaggattactcgtacaaaacgtaaactcagctctgccaattttcccatggagggggaatcttacttcgagaaagatgaaaaatattctaattgctcaatcttgctcgaattatctgcttcggacgatctcccagcttttgaaaggaaagcgaaagagaagggctgtaacattgatggtgctagcttctggtacggtagaagaattggctcaaggaagatgggtcttgaagagaggactcctctcatggtggcttccttgtttggaagctctagggttgtgaagtacattctcgaatctggcaaagtcgatgtaaatagggcttgtggttcggacaaggtcactgcccttcactgtgctgttgccagtggctctgcttctgcggtggaggttgtcaagctcttgcttcacgcatctgccgatgctaattgcattgatggcaatggaaagaagccaattgatgtgatagcccttccattaaagtcacgcggcgattcaaggaggaagctgatggagctgttgctgaaaggcgataattctgatggggaatttgaatcccacgaggagaagccgattgccgcaccgcaagcatccaaagagggaagcgaaaagaaagagtatcaatttcctgttgatatctctctgcctgacataaatgttgggatttacagtactgatgagttcagaatgtatgctttcaaagtaaagccttgctcgcgggcatactcccatgactggacagagtgcccatttgttcatcctggcgagaatgcgaggaggcgggaccctcgcaagtacccctacagctgcgtcccttgccctgaatttcggaagggatcttgccaaaagggtgactcctgtgagtacgcgcacggcgtatttgagtcgtggcttcatcctgcacagtatagaacaagactgtgcaaggatgagactggatgtgctcgcaaagtttgtttctttgctcacaagcccgaagaattaaggcctgtctatgcttcgacgggatcagctatgccttccccaaaatcctactcatcaagtgggctggacatgtccacattgagtcctctctcaatcagttctccgtcagcatcgttgcctgttacttcaacagcacccatgtctcctcttgcagcctcgtcatctccgatgtctgtgaacatgtggcagagcaaggctaacaagctctccccgccaatgctgcagctctcaggtagtaggctgaagactgctttgagtgctagggacttggacctggagatggaattgcgtggtctagagagtcagatggccactcaacagcatcagttgatggaagagatatctcgtctctcctcaccatcatcctgctttagtagtaggattggggaagtgaaacccactaacctcgatgacgtttttgggtctccggatcctgctttgctgcctcaattgcaggggctgtcaagaccttcaacaccaagccagttgcaatctccaactgggcttcagatgcgccagaatgcaacccagtttcgtggggcgtaccagagcaatgcaaatgcattgtcatctccagcaatgaagcaggcaccttcttatgggtttgactcatctagtgcagttgcagcagcggtgatgaattcgaggtcagccgcttttgcgaagcggagtcagagttttatcgacaggggaatggcgtgccctggaattgccaattcttcccctatgatgtcttcagctatgtcgagctggagctcacctcatgggaaattggattggggcgtccaaggagatgagttgaataggctgaggaaagctgcttcctttaagatgagaagcagcaccggagcaggtgctaatactgtctcggcagcagccatggctgatgagccagatatttcttgggtcagttcattggttaaggacgtgccttctgcggaggacgcgatgttcgctgcagagaaaggacagcgcacttatgggaaagacatccgcgaaaggattaccccatgggtggagcagctgtacagagaagtgccacggatggcgatgtaagattgccactgcaagtcggatgccttagtatgctgactaattgatattctttgcatttgttttgaggcatttggtagccattagatacgagaaaaggccaagcagcaggtggtgtcttggcaaggaataggatgcacatagtctgttatcgagtagaatagacttgggaacaatggttatagccaaatgttaaaagttatgatattcttttccaattctttctcttcctcatagtaggtttctcaccaagtcttttagtgagagcctgcgggatgtactatatgtttcccttatgtaacgtctcttcgttgaaagaaatggctttataatataaagcatcaagttttttaaaaaaaaaa

SEQ ID NO: 29 - protein, 663 aa, Eucalyptus grandis
MEGESYFEKDEKYSNCSILLELSASDDLPAFERKAKEKGCNIDGASFWYGRRIGSRKMGLEERTPLMVASLFGSSRVVKYILESGKVDVNRACGSDKVTALHCAVASGSASAVEVVKLLLHASADANCIDGNGKKPIDVIALPLKSRGDSRRKLMELLLKGDNSDGEFESHEEKPIAAPQASKEGSEKKEYQFPVDISLPDINVGIYSTDEFRMYAFKVKPCSRAYSHDWTECPFVHPGENARRRDPRKYPYSCVPCPEFRKGSCQKGDSCEYAHGVFESWLHPAQYRTRLCKDETGCARKVCFFAHKPEELRPVYASTGSAMPSPKSYSSSGLDMSTLSPLSISSPSASLPVTSTAPMSPLAASSSPMSVNMWQSKANKLSPPMLQLSGSRLKTALSARDLDLEMELRGLESQMATQQHQLMEEISRLSSPSSCFSSRIGEVKPTNLDDVFGSPDPALLPQLQGLSRPSTPSQLQSPTGLQMRQNATQFRGAYQSNANALSSPAMKQAPSYGFDSSSAVAAAVMNSRSAAFAKRSQSFIDRGMACPGIANSSPMMSSAMSSWSSPHGKLDWGVQGDELNRLRKAASFKMRSSTGAGANTVSAAAMADEPDISWVSSLVKDVPSAEDAMFAAEKGQRTYGKDIRERITPWVEQLYREVPRMAM

SEQ ID NO: 30 - DNA, 2001 bp, Triticum aestivum
  misc_feature (481)..(530): n is a, c, g, or t
cgaattccggtcgacgatttctcgatttccttctctataacacaacgctctcttctcttgcaaccaaagtacttgttccagtgtctactctactcaaaaaggatttgggacatcatgtgcagtgattcgaaaagtaaactttcttccccaaccctcgtcgtcatggagaatagtaacattcagaagcagaatctggatggtctctacaactcggttttgcttgaattgtctgcatctgatgattatgaagctttcaaaagagaggtggaggaaaaaggcttagatgtgaacgaggcaggcttttggtacggtagaagaattgggtcaaagaagatgggatctgaaacgaggacccctctgatgattgcttctttgtttggaagcgccaaggtgctcaattatattcttcttcagaaaggaggaggtgttgatgtgaacagggtctgtggttctgatagggccactgctctccattgtgctnnnnnnnnnnnnnnnnnnnnnnnnnnnnnnnnnnnnnnnnnnnnnnnnnntcccgggtcgcgatttcgtaggagattcacagagagaaaagaagcaattagtgataataagaaagaataccctgttgatatatcactgccagacataaacaacggtgtatatggaacagatgattttaggatgtacaacttcaaggtgaagccttgctcaagggcttactcccatgactggaccgagtgtccattcgttcacccaggggagaacgctaggaggagagacccacggaaatacccttacagctgtgttccttgccctgagttccgcaaagggacctgccagaagggtgattcctgtgagtatgctcatggtgtttttgagtcctggctgcatcctgcccaataccggacaaggctttgcaaggatgagactggctgcgctagaaaagtctgcttctttgcccacaaacctgaagagctacgccctgtgtatgcttccactgggtcggctatgccatcaccaaaatcatattcagctagtggacttgacatgacagcgatgagtccattggctctaagttccacatctttgcctaatgcccccccgtttccagcctcaccctatcgtgcgccctcgttcttctctcagagtgaagctgtgcagaacaaaataaaccttactccaccatcgttgcagctccctggtagccgactgaaggctgctttgagtgccagggatctggagatggagatggaactgctcggtctagaaagccctgctcgccaacaacagcagcagcagcaacaattgatcgaagagattgccaggatctcttccccatctttccggagcaaggaattcaataggattgttgatttgaatcctactaaccttgatgacctgttagcatctgctgacccttctgtattttctcaactacatggactttctgtgcaaccttcaacacccacacaaagtgggcttcagatgcgccaaaacatgaaccacctccgtgcgagttatccatccaacatcccttcctctcctgtgaggaagccctcagcttttgggtttgactcatcagctgctgtggcaactgcagtgatgaattctaggtctgctgccttcgcaaagcgaagccaaagtttcattgatcgtggagctgcaacccaccatcttgggctgtcttcagcttccaactcttcttgcagggtatcctctaccctttcagattggagttcccctaccgggaaactggattggggtgtaaacggagacaagctgaacaagctgaggaaatctacttcctttggattcagaaacagtggggtaactgcatcccccatagcacagcctgaatttggtgctgagccggatgtctcatgggttcattcattggttaaagatgttccctccgagaggtctgagatatttggtgctgagaagcaacaatatgatctcagtaaagagatgcttccaccatggatggagcagctgtatatagagcaggagcagatggtagca

SEQ ID NO: 31 - protein, 667 aa, Triticum aestivum
  UNSURE (161)..(177): Xaa can be any naturally occurring amino acid
RIPVDDFSISFSITQRSLLLQPKYLFQCLLYSKRIWDIMCSDSKSKLSSPTLVVMENSNIQKQNLDGLYNSVLLELSASDDYEAFKREVEEKGLDVNEAGFWYGRRIGSKKMGSETRTPLMIASLFGSAKVLNYILLQKGGGVDVNRVCGSDRATALHCAXXXXXXXXXXXXXXXXXPGSRFRRRFTERKEAISDNKKEYPVDISLPDINNGVYGTDDFRMYNFKVKPCSRAYSHDWTECPFVHPGENARRRDPRKYPYSCVPCPEFRKGTCQKGDSCEYAHGVFESWLHPAQYRTRLCKDETGCARKVCFFAHKPEELRPVYASTGSAMPSPKSYSASGLDMTAMSPLALSSTSLPNAPPFPASPYRAPSFFSQSEAVQNKINLTPPSLQLPGSRLKAALSARDLEMEMELLGLESPARQQQQQQQQLIEEIARISSPSFRSKEFNRIVDLNPTNLDDLLASADPSVFSQLHGLSVQPSTPTQSGLQMRQNMNHLRASYPSNIPSSPVRKPSAFGFDSSAAVATAVMNSRSAAFAKRSQSFIDRGAATHHLGLSSASNSSCRVSSTLSDWSSPTGKLDWGVNGDKLNKLRKSTSFGFRNSGVTASPIAQPEFGAEPDVSWVHSLVKDVPSERSEIFGAEKQQYDLSKEMLPPWMEQLYIEQEQMVA

SEQ ID NO: 32 - DNA, 2683 bp, Eucalyptus grandis
gcaaaggtcgatcacttcctccctagaaagcgagtgtggagttgaagcttgataaccagaggccgcctctcgtctcgtctcgcccgcctgcgcttgctctgctctccgcgtgccaagggagtgttcctaggtgctgaatctttccatgtgtagcggttcaaaagggaagggagagtgaattcgagaagcagaggatgtcggcccgtcagttctcgatcctgctcgagttatctgctgcggatgatctgacgaactttaagaaagcagttgaggaagacggctacgatattgatgagtcgagcttgtggtatggtaggaggatcgggtcgaagaagattgggcttgaagagagaactcccctcatgattgccgcgatgttcggcagtatgtccgtgctggattatattatcaagtctggccgggccaatgtaaacaaggcgtgtggttcagatggtgctaccgcgcttcactgtgctgcggctggtggctcggtacaatctcctgaggtggtcaagctgttgcttgattcttcagcgaatgctaactccattgatgcgaatgggaaacgagcgggagacttgatttctgaggtctctggttcgcccttcaattcgagaaggaagactttggatgtcatgttgactggaggtgggactgttgagtttgttgaggaaacttacaatctgcctgagaatctgggtagtcaaattgaaggaaacgaacaaagagagagtccaacggcccgcgcttccaaggatggttctgaaaagaaagagtatcctgtcgacctttctcttccggacatcaacaatggaatatatagcacagatgagtttaggatgtattctttcaaagtgaagccttgctcgagagcttactctcatgactggactgagtgtccatttgttcaccctggggagaatgcaagacggcgtgacccacggaaatatcactacagctgtgtgccttgccctgagttccgcaaggggtcatgcaggcaaggggatggctgcgagtatgctcatggtatatttgagtgctggcttcacccagctcaatatcgcacccgtctctgtaaggatgagattggatgcaccagaaaagtctgtttctttgcccacaaacatgaagagcttcgtccattgtatgcatcaactggttcggcgcttccttctccaagatcattttcgcccgttgctgcttctctagacatgggatcactgagccctctctctctcggttcttcttcagtccggataccgccaacttcaacaccacctatgactccatcaggggcctcttctccccttggtgggtcgatgtggaaaagccaaattaatagcactccgcctggcttgcagcttccaggtagcaggttgagaagcgcattgagtgctagagacatggatttagatgttgacttgatcgatctagaaaataattatcgtttgcagaagcagttgctcgaacactttcctgatctgtcctctcctcgtggttggaacaactcttcatccaccacgtcggctttccctgagtattcaggtgacatgactggagaaataagtaggttaggagtaaaaccaaataatctcgaggatagtttcaggtcattggacctgaccctcttgtctcagttacaagggctgtcacttgatggtgcaatatcccagctgcaatctcctactggaatgaagattcggcagaacatgacccagcagctctactcaaactatactgacaagctttcctcgtcacctagggcaatgccatcatttggaaccgatccttccagagcttcagcagcagccactctgagttccaggtcattggcatttgcaaaaaggagccacagcttcattgagcggagtacagtgaacagtcagtctggatattcagcaggtgctgcttctccaactgcaaggatgtcttcccagaatgactggggctcgcccgatggcaaactagactggggcattcaaggggaggagctgaacaagctgaggaaatctgcatcattcgggctcaggagcagcagcaaccgcttccatgcgtctgcagattctgcgacagcaactgtaggggacccagacatgccctggattcagtccttggcaaaggaagccccgtcacaaaaccctggcaattttggagcagagcatcagcagcagcagcagcagcagcagcagcagcagtatcatcttaattctggaggtactgagctgcttccagcttgggtggagcagttgtacgcggatcaggagcagatggtcgcctgagatcaacattggcttcttatctaaccactattagtcatttcgttattgctttaattttttttcttctgagtctagtattaatgtctaggattcgaacgaactggaaaattaaatctagagggaagatgggaagaaaagagcaggatggaaggtttctgctcggtccgagatttctcatagtctattatagactatcgtatttctcgttcttttccgtcccaatgttcttgatttggttctcagcatgttttctggatgaggcttacaaactatgtaatcttgtcttgctaaaagaatcagagctgcacctgcaccaaaggttgtgatactaccgcttattgatgatgatgataataataataattcggacatttagtaccaagtccgatgtctcaaaaaaaaaa

SEQ ID NO: 33 - protein, 694 aa, Eucalyptus grandis
MSARQFSILLELSAADDLTNFKKAVEEDGYDIDESSLWYGRRIGSKKIGLEERTPLMIAAMFGSMSVLDYIIKSGRANVNKACGSDGATALHCAAAGGSVQSPEVVKLLLDSSANANSIDANGKRAGDLISEVSGSPFNSRRKTLDVMLTGGGTVEFVEETYNLPENLGSQIEGNEQRESPTARASKDGSEKKEYPVDLSLPDINNGIYSTDEFRMYSFKVKPCSRAYSHDWTECPFVHPGENARRRDPRKYHYSCVPCPEFRKGSCRQGDGCEYAHGIFECWLHPAQYRTRLCKDEIGCTRKVCFFAHKHEELRPLYASTGSALPSPRSFSPVAASLDMGSLSPLSLGSSSVRIPPTSTPPMTPSGASSPLGGSMWKSQINSTPPGLQLPGSRLRSALSARDMDLDVDLIDLENNYRLQKQLLEHFPDLSSPRGWNNSSSTTSAFPEYSGDMTGEISRLGVKPNNLEDSFRSLDLTLLSQLQGLSLDGAISQLQSPTGMKIRQNMTQQLYSNYTDKLSSSPRAMPSFGTDPSRASAAATLSSRSLAFAKRSHSFIERSTVNSQSGYSAGAASPTARMSSQNDWGSPDGKLDWGIQGEELNKLRKSASFGLRSSSNRFHASADSATATVGDPDMPWIQSLAKEAPSQNPGNFGAEHQQQQQQQQQQQYHLNSGGTELLPAWVEQLYADQEQMVA

SEQ ID NO: 34 - DNA, 2499 bp, Arabidopsis thaliana
attttgaccttaagaagaaagtgacaaggagaggaagaagaagaaaaaaaacataatttgaggaagaagaaaaaaaattcggatttgttttttcaataaattgactaattgagtactcgtttaaaggaagtgaagagcggttttttggtagtggtggtcgagaaaagagagagtttgtctctgtgactcagagtgaaatcaatagagcgggaaaagattgttgcttttttttgccatgggagttgatgagctgtctcacctcaaattctctcttctgctagaatcatcagcctgcaatgatttgtccggttttaagtctctagttgaagaagaaggtcttgagagcattgatggctctggtttgtggtatgggaggagattaggatcaaagaagatgggttttgaggagaggacgcctcttatgattgctgccttgtttggaagcaaagaggttgttgattacatcattagtactggtcttgttgacgtgaaccgctcttgtggctctgatggtgccacggctcttcactgtgcggtctctggcttgtctgccaatagccttgagattgttactcttctgctgaagggctctgcgaatccggattcttgtgatgcttatggtaacaagcctggagatgtgattttcccttgtttgagtccggtttttagcgcgaggatgaaggttttggagcgtttgttgaaaggaaatgatgatttgaatgaagttaatgggcaagaagaaagcgagccagaggttgaggttgaggttgaggtttcgcctcctcgggggtctgagaggaaggagtatccggttgatccaacgcttcctgatatcaagaacggtgtatatgggacggatgagttccggatgtatgctttcaagatcaagccgtgctctagagcatactctcacgactggacggaatgtccctttgttcatccgggtgagaacgcaaggaggcgtgatccgaggaagtaccattatagttgtgtcccttgtcctgaattccggaaggggtcttgttccagaggtgatacttgcgagtatgctcatggtatctttgagtgctggcttcacccggctcagtaccggactcgtctctgcaaggacgagacgaattgctcgagaagagtttgtttctttgcccacaaacccgaggagctgcgtcctttgtacccttcaactggatcaggtgttccgtccccgcggtcttccttctcatcttgcaattcctcgaccgctttcgacatgggaccgattagtccgcttcctatcggagcaacaaccacacctcctttgagtcctaacggtgtatcctctccaataggtggaggaaaaacgtggatgaactggcctaacataacccctcctgcattgcagcttccagggagcagattgaaatctgcattgaatgcaagagaaatcgatttctctgaagagatgcaaagtcttacttctccaactacatggaacaacacgccaatgtcatctccattctccggaaagggcatgaacaggcttgcaggaggagcaatgagcccggtgaatagtctcagtgatatgtttgggacagaggataatacatcgggtttgcagatccgacgcagcgtcattaacccgcagctgcattccaacagtctttcttcatcacctgtgggagccaattctctgttttcgatggattcctccgcagtcttggcttcaagagcggctgaatttgctaaacagcgaagccaaagcttcatagaacgcaacaacggactgaatcaccatcccgcaatctcttccatgactacaacttgtttaaacgattggggctcattggatgggaagcttgactggagcgtccaaggagacgagctacagaagctcagaaaatccacttctttccgtctcagagccggtggcatggaatcaagactgcctaacgaagggactgggctcgaagagccagatgtctcatgggtggagccgctggtgaaagagccacaggagacaagactagctccggtttggatggagcaatcatacatggagacagaacagaccgtggcttgaatcaaaagttttgaactttcattaaccgttccacaagaagcaaagtcagaaagattccgagaggtcgatgctaatctatttcattttatttgtttaatgctttgttatttttctttagaataaaaagaaaaaattcttaggggacaaaagagagttcgtttgtctctctctctgtctccaaagaaaaacagaggtgaaaaaaggtttcaaaacctaagaaaccttgaattacctcacctcacttccttgattctttactattcacaatgagtaatcgatttttttttttcttggtaacactctcacgctgaatatatatgttttttagtaataatataattggaatacagaaatgtatttacacttgtgaagttagggaaagtgttgtaattgtttcttctaagagttgatctaagatgtttgagactatatcttcgctt

SEQ ID NO: 35 - protein, 607 aa, Arabidopsis thaliana
MGVDELSHLKFSLLLESSACNDLSGFKSLVEEEGLESIDGSGLWYGRRLGSKKMGFEERTPLMIAALFGSKEVVDYIISTGLVDVNRSCGSDGATALHCAVSGLSANSLEIVTLLLKGSANPDSCDAYGNKPGDVIFPCLSPVFSARMKVLERLLKGNDDLNEVNGQEESEPEVEVEVEVSPPRGSERKEYPVDPTLPDIKNGVYGTDEFRMYAFKIKPCSRAYSHDWTECPFVHPGENARRRDPRKYHYSCVPCPEFRKGSCSRGDTCEYAHGIFECWLHPAQYRTRLCKDETNCSRRVCFFAHKPEELRPLYPSTGSGVPSPRSSFSSCNSSTAFDMGPISPLPIGATTTPPLSPNGVSSPIGGGKTWMNWPNITPPALQLPGSRLKSALNAREIDFSEEMQSLTSPTTWNNTPMSSPFSGKGMNRLAGGAMSPVNSLSDMFGTEDNTSGLQIRRSVINPQLHSNSLSSSPVGANSLFSMDSSAVLASRAAEFAKQRSQSFIERNNGLNHHPAISSMTTTCLNDWGSLDGKLDWSVQGDELQKLRKSTSFRLRAGGMESRLPNEGTGLEEPDVSWVEPLVKEPQETRLAPVWMEQSYMETEQTVA

SEQ ID NO: 36 - DNA, 1806 bp, Oryza sativa
atgtgctctgggccgcgcaagccgtccacaccgccgctgccgcagcagcagaaggaggcgacggtgatggcggcgtccttgcttcttgagctggcggcagcggacgacgtggcggcggtgaggagggtcgtggaggaggagaaggtgtctcttggcgtggctgggttgtggtatgggccttcggcgagcggcgtggcgaggctcgggatggagcggaggacggcggcgatggtggcggcgctgtacgggagcacgggggtgcttgggtatgtcgtggcggcagcgccggcggaggccgcgcgcgcgtcggagacggatggggccacgccgctgcacatggcggctgccggtggcgcggcgaacgcggtcgcggccacgcgcctgttgctcgccgcgggggcgtcggtcgacgcgctctcggcttcggggctccgcgccggtgacctcctcccgcgcgccaccgcggcggagaaggccatccggctgctgctcaagtcgccggccgtgtcgccgtcgtcgtcgccgaagaagtcggcctcgccgccgtcgccgccgccgccgcaggaggcgaagaaggagtacccgcctgacctgacgctgcccgacctcaagagcggactgttcagcaccgacgagttccgcatgtacagcttcaaggtgaagccgtgctcccgcgcctactcccatgactggaccgagtgccccttcgtccaccccggcgagaacgcgcgccgccgcgaccctcgccgctactcctacagctgcgtgccttgcccggagttccgcaagggcggctcgtgccgcaagggcgacgcgtgcgagtacgcccatggcgtgttcgagtgctggctccacccggcgcagtacaggacgcgcctctgcaaggacgaggtcggctgcgcgcgccgcatctgcttcttcgcccacaagcccgacgagctccgcgccgtcaacccctccgccgtgtccgtcggcatgcagcccaccgtatcgtcgccgcgctcctcgccgcccaacgggctcgacatggcggcggcggcggcggcgatgatgagccccgcctggccgtcgtccccagcgagccgcctcaagacggcgctcggcgcgcgggagctcgacttcgacctcgagatgctcgcgctggaccagtaccagcagaagctgttcgacaaggtgtccggcgcgccgtcgccgagggcgagctggggcgccgcggcgaacggcctcgccaccgcgtcgccggcgagggccgtgccggactacaccgacctgctcggctccgtcgacccggccatgctgtcccagctccacgcgctgtccctcaagcaggccggcgacatgcccgcgtacagctccatggcggacaccacgcagatgcacatgccgacctcgccgatggtgggcggcgcgaacaccgcgttcgggctggaccactccatggcgaaggcgatcatgagctcccgcgcctcggcgttcgccaagcgcagccagagcttcatcgaccgcggaggccgcgccccggcggcgcgttcgctcatgtcgccggcgacgaccggcgcgccgtccattctctcggactggggctcgccggacggcaagctggactggggcgtccagggcgacgagctgcacaagctccgcaagtcggcgtcgttcgcgttccgcggccaatccgccatgccggtggcgacgcacgccgcggcggcggagccggacgtgtcatgggtgaactctcttgtcaaggacggccacgccgccggcgacatattcgcgcagtggccggagcaggagcagatggtggcatga

SEQ ID NO: 37 - protein, 601 aa, Oryza sativa
MCSGPRKPSTPPLPQQQKEATVMAASLLLELAAADDVAAVRRVVEEEKVSLGVAGLWYGPSASGVARLGMERRTAAMVAALYGSTGVLGYVVAAAPAEAARASETDGATPLHMAAAGGAANAVAATRLLLAAGASVDALSASGLRAGDLLPRATAAEKAIRLLLKSPAVSPSSSPKKSASPPSPPPPQEAKKEYPPDLTLPDLKSGLFSTDEFRMYSFKVKPCSRAYSHDWTECPFVHPGENARRRDPRRYSYSCVPCPEFRKGGSCRKGDACEYAHGVFECWLHPAQYRTRLCKDEVGCARRICFFAHKPDELRAVNPSAVSVGMQPTVSSPRSSPPNGLDMAAAAAAMMSPAWPSSPASRLKTALGARELDFDLEMLALDQYQQKLFDKVSGAPSPRASWGAAANGLATASPARAVPDYTDLLGSVDPAMLSQLHALSLKQAGDMPAYSSMADTTQMHMPTSPMVGGANTAFGLDHSMAKAIMSSRASAFAKRSQSFIDRGGRAPAARSLMSPATTGAPSILSDWGSPDGKLDWGVQGDELHKLRKSASFAFRGQSAMPVATHAAAAEPDVSWVNSLVKDGHAAGDIFAQWPEQEQMVA

SEQ ID NO: 38 - DNA, 1692 bp, Hordeum vulgare
cggcacgaggcacatccatcatctaacctcacctctcctctcctcccctctcctcctaccaaacccaaaaccaagcagagcaagagcaagagcaagagcaagagcaagcaagcatgtgccctggcctgcgcaacctcgccgccgccatgccaccctccgcccacgaccacccctcctcctacctgctcgagctcgccgccgacgacgacctccccgccttccgccgcgccgtccaggaggacaacctctccctcgacgccgcatccccgaggtacgagccatcccccaaatcagaccaacaacaacaacacgccccagctcgcgctccacctgcgcacccccgccatggtcgccgcgctctacggcagcaccaccgtcctctcctacgtcctctccatcgccccctccgaggccgcccgcgcctccgcatccgacggcgccaccccgctcctcctcgcccaccagggccgcgcgccatccgcgccccacgccgcacgcctcctcctcaccgacggcgcatcatcgtcctccctactcgcgccccaagctcaccctctcaaccaccaaaaccaaaaccaaaacagccccaccaagaaagactcgccgccggactccaggaggaccaccaccaagaaggactactcctccgcctccgactcccagacggaggacatcaacgcgggcgtcttcgccaccgacgacttccggatgtacagcttcaaggtgaacccgtgctcccgcgcctacacgcacgactggaccgagtgccccttcgcccaccccggcgagaacgcgcgccgccgcgacccgcgccgcgtgccatactcgtgcgtcccatgcccggacttccgccgcgacccggccgcatgccgcaagggcgacgcctgcgagtacgcgcacggcgtcttcgagtcatggctccaccccgcgcagtaccgcaccaggctctgcaaggacgaggtcggatgcccgcgccgcatctgcttcttcgcgcacggcgcccgacagctacgcgccgtcaacccctccgccgcatccatggactcgccatccccaacttcctcttcgccgccgcgaacctccaggccggccgcgctcaccgcgtcgctcagctcgcgggacctcgacttggacgccgacaaccaggcccagtacgcgcgcaggatgatgatggccagggccaactccccgccggactactcgcccgacctcgtcgccgcctacgtacaggcgctctcctccctgcaacagcagcagcatcagcagaaccagcaacagcagcatcagcagcagaaccagcaccagcagcaacatcagcagaaccagcaccagcagcatcagcagcaacatcagcagagcatggggatgggggggctgagcgcccgcgccgccgccttcaccaaccgcagccagaccttcgtgcaccgctctccgtccccggctccggcgcggtcgttcaagtctccggcgccgtcgtccatgctcgcggactgggggtcgccggacgggaagctggactggggcgtgcaggccgcggagctgcgcaagtccacgtctttcggagtcagaagcagcagcaggccgcatcatgagacgacgagggcggaggacaacatgtacccgtcgtggatgaaggacggcagcgatatgctgctggcggcgcggtggtcggacctggagcagatggtcgcc

SEQ ID NO: 39 - protein, 564 aa, Hordeum vulgare
RHEAHPSSNLTSPLLPSPPTKPKTKQSKSKSKSKSKQACALACATSPPPCHPPPTTTPPPTCSSSPPTTTSPPSAAPSRRTTSPSTPHPRGTSHPPNQTNNNNTPQLALHLRTPAMVAALYGSTTVLSYVLSIAPSEAARASASDGATPLLLAHQGRAPSAPHAARLLLTDGASSSSLLAPQAHPLNHQNQNQNSPTKKDSPPDSRRTTTKKDYSSASDSQTEDINAGVFATDDFRMYSFKVNPCSRAYTHDWTECPFAHPGENARRRDPRRVPYSCVPCPDFRRDPAACRKGDACEYAHGVFESWLHPAQYRTRLCKDEVGCPRRICFFAHGARQLRAVNPSAASMDSPSPTSSSPPRTSRPAALTASLSSRDLDLDADNQAQYARRMMMARANSPPDYSPDLVAAYVQALSSLQQQQHQQNQQQQHQQQNQHQQQHQQNQHQQHQQQHQQSMGMGGLSARAAAFTNRSQTFVHRSPSPAPARSFKSPAPSSMLADWGSPDGKLDWGVQAAELRKSTSFGVRSSSRPHHETTRAEDNMYPSWMKDGSDMLLAARWSDLEQMVA

SEQ ID NO: 40 - DNA, 3610 bp, Pinus radiata
tgtttccaggcgggcactaaagcaagggagggggtaggctttactttctgctctgcgcaaagaacgttgaaatcaatcgccctggctggtctggcgtgactactagattcaatttcttcatggccgtcttcacatacccattctttaccggttcagagctgtgatctttatttttaacagccacaatcatggtttgtgtttccagtgttatgatctgagtgaagttcgttctttttctcgtgacccaggcttgatactaggccggacctttctgaggtggaagagatctatacatttgaggcctattttgtgtagccatgtgtggaggcccagaacatttgaagcctgccagcccacacgaaggagaagataaagtcaaaatggccgagaatcagtctatcaaagtgaaggaattgtctgaatcttgttcaagtctacatgaactagctgctaataatgaccttattggctttaagaaagcaatggaggaagaagggtcaaagatagatgaggttaacttttggtacgggaggcagaatggttctaatcagatggtcctggagcaaaggactccattgatggttgctgcactttatggcagtgtagatgcgctgagttacatcttatccatttatgtaacttgtggagcagatgttaaccaagcctgtgggtcagataactccactgccttgcattgtgcggctgtgggagggtctgcctgtgcagttgaaactgtaaaattgttacttcatgcaggcagtgatgtgaatcgcttggatgcttatggcagaagaccagcagatgtgattatggtttctcctaagctaaccgaaatcaaggccaagctagaagaaatgttaaacgcagctggttcatgtcaaacttctccggcaaagttgcctaacatagtttcagggccacctgggtttgagtcaaaggggatggagtccatgtccccattgccattgttgcctctttcattgtctttagaagcatccaataatagatcaggttgtgtgaattctccaacatcttcgccaaagtccatggaagcattaaagggtttcggtgatgttaatgagaagaaggaatatcctgtggacccttcttttccagacataaagaatagcatctatactacagatgaatttcggatgttttccttcaaggtgcggccatgttcacgggcatattctcatgattggactgaatgcccatttgtgcatcctggtgaaaatgccagaaggcgggatccaagaaggtatcattatagctgtgttccttgcccagattttcggaaagggacttgtaggcgcagtgatgtttgtgaatatgcacacggtgtttttgagtgctggttacatcctgctcaatataggacacggttgtgcaaagatgggactaattgttcacgtagagtttgcttctttgctcacacatctgaggaactacgccctctcattgtctctactgggtctgctgttccatccccaagggcatcatcatctctggacatgacatctgtcatgagtcctcttgcccctggttctccctcttcagtttcaatgatgtcacccttcctatcaaatcctcagcaaggcagtgtgcttactccgcctatgtctccatcagcgtcctctgtaaatggatatggaggctggccacagcctaatgtaccaaccttacaccttcctggtagcaatgttcaaaccagccgtcttagagcggaacttaatgccagagacatgcctgttgaggattctcctcgaatttcagactatgaagggcagcaactcctgaatgatttttctccactgtccacacaagccaggctgaatgctgctgctgctgttatatctggtggcgggaacaccacaacaaggtctggaaaatacaagagtcacgggatcaatactgttgctccaacgaatcttgaagacttgtttgcctccgaggtaacatctcctagagtagcagttcttgaaccttccatcttttctcagatgagtccccaaatgcaagctcataagactgcccaggcatatatgcagattcaaaaccagatgctgcctcctataaatacacaggcattttcgcagggaattacacagatgcagcaggctgcaatagagcctcagagccctggacattctttgatgcaatcacctttccaatcttcctcgtatgggttgggatcccctggtagaatgtcacctcgttgtgtggatgtggaacgtcataatacatgtgggtctcccttatcaccggctatggctgcaacgataaattcaagaatggctatggctgcttttgttcagagggaaaaacggagccatagttcccgtgacttgggagctaatgtgaatcccagttcatggtctgattggggctcgcctacaggtaaagttgactggggggttcaaggagaagagttgagcaaattaagaaagtcggcttcatttggtccccgcagttatgaagaaccggatttgtcttgggttcaaacactggtaaaggaaactacaccagagggtaaagatggaggaaatgtaagctgttctggggaaactccacacaaggggcaaatagaaaatgttgatcattcagttttgggtgcctggattgaacagatgcagcttgatcagattgtagcttgagattaggattatttatttggagtggtggtagggataggctcatttaaaattcaatttctcattttttactatttcttttataaaaattccccattatagtttaggaaatagtctggttttctacctattatcagaattacacctgcaggaaattttggaggaaagcatgcaaaaagtagatagggatgttattcctatcagcaggttgacaagctgaaaatcacttgggtggtagaccagagaatgacactattttttgttgacatggcaactgaagatgctgttttctttacttatcattaacaaccctatatatatttgttttgaaagaactgagcggagaaatgttgtcagttggttactctgcgcaaggccttggaagaaatccaagatgtggcatcttggtgcatttttaatttatcaagtgtgaaatccataacaggtttcagtgagtgacttctgaggttgtatatggaaaaacctatgatgttggctgtctactgctatttttctgtgcctaaactgtcaactaaagtttgcaggtggcaattttgtggcagcatatttgcacattgaagcggatggtctgcacctgctatagaagttttcgagtctgtagaatttgatggtgcaagatgattttctagttgatatatttggaaggctttgccaaagtagtggcatgtacattttgcaaaaatttaaaggatggcaatccattgttttgccatgtagcttcactttattgattaggtggaaaggaattttgagacacttcaatttgtgcatacttttgttctgaactgcaaaatcagtctcttgtgatgtcctcaaggctattatgctcagggatttgcctaaaaccataagtggccttagataaggtaccattgtattaccttttattgtttggatattttatttatgaaagtgaatttattttaaaaaaaaaa

SEQ ID NO: 41 - protein, 779 aa, Pinus radiata
MCGGPEHLKPASPHEGEDKVKMAENQSIKVKELSESCSSLHELAANNDLIGFKKAMEEEGSKIDEVNFWYGRQNGSNQMVLEQRTPLMVAALYGSVDALSYILSIYVTCGADVNQACGSDNSTALHCAAVGGSACAVETVKLLLHAGSDVNRLDAYGRRPADVIMVSPKLTEIKAKLEEMLNAAGSCQTSPAKLPNIVSGPPGFESKGMESMSPLPLLPLSLSLEASNNRSGCVNSPTSSPKSMEALKGFGDVNEKKEYPVDPSFPDIKNSIYTTDEFRMFSFKVRPCSRAYSHDWTECPFVHPGENARRRDPRRYHYSCVPCPDFRKGTCRRSDVCEYAHGVFECWLHPAQYRTRLCKDGTNCSRRVCFFAHTSEELRPLIVSTGSAVPSPRASSSLDMTSVMSPLAPGSPSSVSMMSPFLSNPQQGSVLTPPMSPSASSVNGYGGWPQPNVPTLHLPGSNVQTSRLRAELNARDMPVEDSPRISDYEGQQLLNDFSPLSTQARLNAAAAVISGGGNTTTRSGKYKSHGINTVAPTNLEDLFASEVTSPRVAVLEPSIFSQMSPQMQAHKTAQAYMQIQNQMLPPINTQAFSQGITQMQQAAIEPQSPGHSLMQSPFQSSSYGLGSPGRMSPRCVDVERHNTCGSPLSPAMAATINSRMAMAAFVQREKRSHSSRDLGANVNPSSWSDWGSPTGKVDWGVQGEELSKLRKSASFGPRSYEEPDLSWVQTLVKETTPEGKDGGNVSCSGETPHKGQIENVDHSVLGAWIEQMQLDQIVA

SEQ ID NO: 42 - DNA, 3610 bp, Pinus radiata; identical to SEQ ID NO: 40

SEQ ID NO: 43 - protein, 749 aa, Pinus radiata
MKEMAEYCSPALLELAANNDLSGFKQAVEEGGSSVNERGLWYGRQIGSGQKMVLEQRTPLMVAALYGSLDVLSYMLSGGRVDVNQSCGSDMSTALHCAAAGGSILAIETVGMLIKAGADVNFMNAGGRKPADVIMVSPKLAHFKNVLEDLLIMGSNSPMKIPCRVSGSGFYLPEGGGCFFDEHGCVVSVPTSSPLFSSPDATSPATVNSPLSSPPTSLDTPKNLCDCGQKKEFAVDSSLPDIKNSIYSTDEFRMYSFKVRPCSRAYSHDWTECPFVHPGENARRRDPRKYHYSCVPCPDFRKGACRRGDVCEYAHGVFECWLHPAQYRTRLCKDGTNCSRRVCFFAHTPEELRPLYPPACSSMLSQRTTMTSSDKMAVMHPLAPGSASSVLMMSSSNSSQSSFPNSPVSPLSSANTSSHSSFGGGSWAHPNLPTLHLSNGALQASRLRTAVNARDMHPDCSIESGDYEGQLLNEFAYLSTQARGNGPMATVSSSGNTPCRPRKFRAHNVAPTNLEDLFASEVFSPKMTASESAFLSEIQSHKSAQLSPQLQSQMLSSFNTQVYPQGSTQGQMHMQHGGVDCQSPSVFLSPPPVQLASYSLSSLGPLSSLTGELERQNSNGSPLSPIMSTAADSRAVAFSQRDKGSSRSGDLGGATTWSEWGSPTGKVNWGIRGEELQKFRKSASFGIRSSDEPDLSWVQKLFKEAPMESMDRGTMGRSMDIANSVQMEATDLGGWISQINPDQVAPLTL

SEQ ID NO: 44 - protein, 711 aa, Glycine max
KSANDKEMKSLTVNTEDSFSSLLELASNNDIEGFKVLLEKDSSSINEVGLWYGRQNGSKQFVLEHRTPLMVAATYGSIDVMKIILLCPEADVNFACGANKTTALHCAASGGSANAVDAVKILLSAGADVNGVDANGNRPIDVIAVPPKLQGAKAVLEELLSDSASEGSIGEFSVPVSVNTSSLGSPGHSSNGMPYTPSSSPPSPVVAKFTDAAVCSLSEKKEYPIDPSLPDIKNSIYATDEFRMFSFKVRPCSRAYSHDWTECPFVHPGENARRRDPRKFHYSCVPCPDFRKGACRRGDMCEYAHGVFECWLHPAQYRTRLCKDGTSCNRRVCFFAHTAEELRPLYVSTGSAVPSPRSSASAPNVMDMAAAMSLLPGSPSSVSSMSPSHFGQPMSPSANGMSLSSAWAQPNVSALHLPGSNLQSSRLRSSLSARDMPPDDLNMMSDLDGQQQHPLNDLSCYLQPRPGAGSVSRSGRSKILTPSNLEDLFSAEISSSPRYSDPAAGSVFSPTHKSAVLNQFQQLQSMLSPINTNLLSPKNVEHPLLQASFGVSPSGRMSPRSVEPISPMSSRISAFAQREKQQQQQQQLRSLSSRDLGANSPASLVGSPANPWSKWGSPNGKADWSVNGDTLGRQMRRSSSFELKNNGEEPDLSWVQSLVKESPPEMIKEKFASPMPTASADGPNSNSQIESIDHSVLGAWLEQMQLDQLVV

SEQ ID NO: 45 - protein, 643 aa, Glycine max
RGSGFPGRPTRPRSGRTRGRTRGVNFACGANKTTALHCAASGASTKAVDAVKLLLSAGADVNCVDANGNRPIDVIAVPPKLQGAKAVLEELLSDNASDVSVGEFSVPVSVNSSSPGSPAHSSNGMPYTPSVSPPSPVAAKFTDAAICSLSEKAREYPIDPSLPDIKNSIYATDEFRMFSFKVRPCSRAYSHDWTECPFVHPGENARRRDPRKFHYSCVPCPDFRKGACRRGDMCEYAHGVFECWLHPAQYRTRLCKDGTSCNRRVCFFAHTAEELRPLYVSTGSAAPSPRSSASGPNVMDMAAAMSLFPGSPSSGSSISLSISFSLDPMSPSANGMPLSSAWAQPNVPALHLPGSNLQSSRLRSSLSARDIPPEDLNMMSDLDGQQQHHLNDLSCYIQPRPGASSVSRSGRSKTLTPSNLEELFSAEISLSPRYSDPAAGSVFSPTHKSAVLNQFQQLQSMLSPINTNLLSPKNVEHPLFQASFGVSPSGRMSPRSVEPISPMSARLSAFAQREKQQQQLRSVSSRDLGANSPASLVGSPANPWSKWGSPIGKADWSVNGDSLGRQMRRSSSFERKNNGEEPDLSWVQSLVKESPPEMIKEKFASPMPTASADGPNSNSQIESIDHSVLGAWLEQMQLDQLVV

SEQ ID NO: 46 - protein, 669 aa, Glycine max
SHEMNHLSLDTEDSLASLLLELAANNDVSGFKRLIECEPSSIDEVGLWYGRHKESKKMVNEQRTPLMVAATYGSIDVMTLILSLSEADVNRSSGLDKSTALHCAASGGSENAVDAVKLLLEAGADRNSVDANGRRPGDVIVSPPKLDYVKKSLEELLGSDDWSLLRVMRSTCNGCSAEDLKMKTNEVSEKKEYPVDLSLPDIKNSIYSSDEFRMYSFKVRPCSRAYSHDWTECPFVHPGENARRRDPRKFHYSCVPCPEFRKGACRRGDMCEYAHGVFECWLHPAQYRTRLCKDGTNCARRVCFFAHTNEELRPLYVSTGSAVPSPRSSASSAMDFVAAISPSSMSVMSPSPFTPPMSPSSASIAWPQPNIPALHLPGSNFHSSRLRSSLNARDFSVDDFDLLLPDYDHHHHQQQQQQFLNELSCLSPHAMNCNTMNRSGRMKPLTPSNLDDLFSAESSSPRYADPALASAVFSPTHKSAVFNQFQHQQSMLAPLNTNFASKNFEHPLLQASLGMSPRNVEPISPMGSRISMLAQREKQQFRSLSFRELGSNSAAASADSWSKWGSPNVKLDWPVGAGEVGKLRRSSSFELGNNGEEPDLSWVQSLVKESPAEVKDKLATTVSYVAAAAAGSSSEGSNISTQMESVVDHAVLGAWLEQMQLDHLVAQQN

SEQ ID NO: 47 - protein, 580 aa, Arabidopsis thaliana
MCSGPKSNLCSSRTLTEIESRQKEEETMLLLEFAACDDLDSFKREVEEKGLDLDESGLWYCRRVGSKKMGLEERTPLMVAAMYGSIKVLTFIVSTGKSDVNRACGEERVTPLHCAVAGCSVNMIEVINVLLDASALVNSVDANGNQPLDVFVRVSRFVASPRRKAVELLLRGGGVGGLIDEAVEEEIKIVSKYPADASLPDINEGVYGSDEFRMYSFKVKPCSRAYSHDWTECAFVHPGENARRRDPRKYPYTCVPCPEFRKGSCPKGDSCEYAHGVFESWLHPAQYKTRLCKDETGCARKVCFFAHKREEMRPVNASTGSAVAQSPFSSLEMMPGLSPLAYSSGVSTPPVSPMANGVPSSPRNGGSWQNRVNTLTPPALQLNGGSRLKSTLSARDIDMEMEMELRLRGFGNNVEETFGSYVSSPSRNSQMGQNMNQHYPSSPVRQPPSQHGFESSAAAAVAVMKARSTAFAKRSLSFKPATQAAPQSNLSDWGSPNGKLEWGMKGEELNKMRRSVSFGIHGNNNNNAARDYRDEPDVSWVNSLVKDSTVVSERSFGMNERVRIMSWAEQMYREKEQTVV

SEQ ID NO: 48 - protein, 719 aa, Arabidopsis thaliana
MCCGSDRLNQIVSSRSSLPISFEEDNNLVTNTDMNHITVETEDTFASLLELAANNDVEGVRLSIERDPSCVDEAGLWYGRQKGSKAMVNDYRTPLMVAATYGSIDVIKLIVSLTDADVNRACGNDQTTALHCAASGGAVNAIQVVKLLLAAGADLNLLDAEGQRAGDVIVVPPKLEGVKLMLQELLSADGSSTAERNLRVVTNVPNRSSSPCHSPTGENGGSGSGSPLGSPFKLKSTEFKKEYPVDPSLPDIKNSIYATDEFRMYSFKVRPCSRAYSHDWTECPFVHPGENARRRDPRKFHYSCVPCPDFRKGACRRGDMCEYAHGVFECWLHPAQYRTRLCKDGTGCARRVCFFAHTPEELRPLYASTGSAVPSPRSNADYAAALSLLPGSPSGVSVMSPLSPSAAGNGMSHSNMAWPQPNVPALHLPGSNLQSSRLRSSLNARDIPTDEFNMLADYEQQQLLNEYSNALSRSGRMKSMPPSNLEDLFSAEGSSSPRFTDSALASAVFSPTHKSAVFNQFQQQQQQQQQQSMLSPINTSFSSPKSVDHSLFSGGGRMSPRNVVEPISPMSARVSMLAQCVKQQQQQQQQQQQQQHQFRSLSSRELRTNSSPIVGSPVNNNTWSSKWGSSNGQPDWGMSSEALGKLRSSSSFDGDEPDVSWVQSLVKETPAEAKEKAATSSSGEHVMKQPNPVEPVMDHAGLEAWIEQMQLDQLVAQQN

SEQ ID NO: 49 - protein, 686 aa, Arabidopsis thaliana
MNHITVETEDTFASLLELAANNDVEGVRLSIERDPSCVDEAGLWYGRQKGSKAMVNDYRTPLMVAATYGSIDVIKLIVSLTDADVNRACGNDQTTALHCAASGGAVNAIQVVKLLLAAGADLNLLDAEGQRAGDVIVVPPKLEGVKLMLQELLSADGSSTAERNLRVVTNVPNRSSSPCHSPTGENGGSGSGSPLGSPFKLKSTEFKKEYPVDPSLPDIKNSIYATDEFRMYSFKVRPCSRAYSHDWTECPFVHPGENARRRDPRKFHYSCVPCPDFRKGACRRGDMCEYAHGVFECWLHPAQYRTRLCKDGTGCARRVCFFAHTPEELRPLYASTGSAVPSPRSNADYAAALSLLPGSPSGVSVMSPLSPSAAGNGMSHSNMAWPQPNVPALHLPGSNLQSSRLRSSLNARDIPTDEFNMLADYEQQQLLNEYSNALSRSGRMKSMPPSNLEDLFSAEGSSSPRFTDSALASAVFSPTHKSAVFNQFQQQQQQQQQQSMLSPINTSFSSPKSVDHSLFSGGGRMSPRNVVEPISPMSARVSMLAQCVKQQQQQQQQQQQQQHQFRSLSSRELRTNSSPIVGSPVNNNTWSSKWGSSNGQPDWGMSSEALGKLRSSSSFDGDEPDVSWVQSLVKETPAEAKEKAATSSSGEHVMKQPNPVEPVMDHAGLEAWIEQMQLDQLVAQQN

SEQ ID NO: 50 - protein, 633 aa, Arabidopsis thaliana
MVNDYRTPLMVAATYGSIDVIKLIVSLTDADVNRACGNDQTTALHCAASGGAVNAIQVVKLLLAAGADLNLLDAEGQRAGDVIVVPPKLEGVKLMLQELLSADGSSTAERNLRVVTNVPNRSSSPCHSPTGENGGSGSGSPLGSPFKLKSTEFKKEYPVDPSLPDIKNSIYATDEFRMYSFKVRPCSRAYSHDWTECPFVHPGENARRRDPRKFHYSCVPCPDFRKGACRRGDMCEYAHGVFECWLHPAQYRTRLCKDGTGCARRVCFFAHTPEELRPLYASTGSAVPSPRSNADYAAALSLLPGSPSGVSVMSPLSPSAAGNGMSHSNMAWPQPNVPALHLPGSNLQSSRLRSSLNARDIPTDEFNMLADYEQQQLLNEYSNALSRSGRMKSMPPSNLEDLFSAEGSSSPRFTDSALASAVFSPTHKSAVFNQFQQQQQQQQQQSMLSPINTSFSSPKSVDHSLFSGGGRMSPRNVVEPISPMSARVSMLAQCVKQQQQQQQQQQQQQHQFRSLSSRELRTNSSPIVGSPVNNNTWSSKWGSSNGQPDWGMSSEALGKLRSSSSFDGDEPDVSWVQSLVKETPAEAKEKAATSSSGEHVMKQPNPVEPVMDHAGLEAWIEQMQLDQLVAQQN

SEQ ID NO: 51 - protein, 678 aa, Arabidopsis thaliana
MNDAAEWEHSFSALLEFAADNDVEGFRRQLSDVSCINQMGLWYRRQRFVRRMVLEQRTPLMVASLYGSLDVVKFILSFPEAELNLSCGPDKSTALHCAASGASVNSLDVVKLLLSVGADPNIPDAHGNRPVDVLVVSPHAPGLRTILEEILKKDEIISEDLHASSSSLGSSFRSLSSSPDNGSSLLSLDSVSSPTKPHGTDVTFASEKKEYPIDPSLPDIKSGIYSTDEFRMFSFKIRPCSRAYSHDWTECPFAHPGENARRRDPRKFHYTCVPCPDFKKGSCKQGDMCEYAHGVFECWLHPAQYRTRLCKDGMGCNRRVCFFAHANEELRPLYPSTGSGLPSPRASSAVSASTMDMASVLNMLPGSPSAAQHSFTPPISPSGNGSMPHSSMGWPQQNIPALNLPGSNIQLSRLRSSLNARDIPSEQLSMLHEFEMQRQLAGDMHSPRFMNHSARPKTLNPSNLEELFSAEVASPRFSDQLAVSSVLSPSHKSALLNQLQNNKQSMLSPIKTNLMSSPKNVEQHSLLQQASSPRGGEPISPMNARMKQQLHSRSLSSRDFGSSLPRDLMPTDSGSPLSPWSSWDQTHGSKVDWSVQSDELGRLRKSHSLANNPNREADVSWAQQMLKDSSSPRNGNRVVNMNGARPLTQGGSSVNPHNSDTRESDILDAWLEQLHLDR

SEQ ID NO: 52 - protein, 640 aa, Arabidopsis thaliana
MGLWYRRQRFVRRMVLEQRTPLMVASLYGSLDVVKFILSFPEAELNLSCGPDKSTALHCAASGASVNSLDVVKLLLSVGADPNIPDAHGNRPVDVLVVSPHAPGLRTILEEILKKDEIISEDLHASSSSLGSSFRSLSSSPDNGSSLLSLDSVSSPTKPHGTDVTFASEKKEYPIDPSLPDIKSGIYSTDEFRMFSFKIRPCSRAYSHDWTECPFAHPGENARRRDPRKFHYTCVPCPDFKKGSCKQGDMCEYAHGVFECWLHPAQYRTRLCKDGMGCNRRVCFFAHANEELRPLYPSTGSGLPSPRASSAVSASTMDMASVLNMLPGSPSAAQHSFTPPISPSGNGSMPHSSMGWPQQNIPALNLPGSNIQLSRLRSSLNARDIPSEQLSMLHEFEMQRQLAGDMHSPRFMNHSARPKTLNPSNLEELFSAEVASPRFSDQLAVSSVLSPSHKSALLNQLQNNKQSMLSPIKTNLMSSPKNVEQHSLLQQASSPRGGEPISPMNARMKQQLHSRSLSSRDFGSSLPRDLMPTDSGSPLSPWSSWDQTHGSKVDWSVQSDELGRLRKSHSLANNPNREADVSWAQQMLKDSSSPRNGNRVVNMNGARPLTQGGSSVNPHNSDTRESDILDAWLEQLHLDR

SEQ ID NO: 53 - DNA, 2158 bp, Oryza sativa
tgctccttcttcattgcaaagaaagcaccaccttttaaagaatcctcctcacactccattcttcttaaaaaacccaccacaacacaattcccacttgtttcttcatcatcacctacttcaatcaaaaaacattccaactttcttctcaatttcattccaggatagtattatgtgcagtggaccaaagagcaatctctgctcttcaagaaccttaacagaaatcgaatcaaggcaaaaggaagaagaaacaatgcttctcctcgaattcgctgcttgtgatgatcttgactcgttcaagagagaggttgaagagaaagggcttgatttggatgagtcagggttatggtattgcagacgtgtcggttctaagaagatgggtcttgaagaaagaacacctttaatggttgcagctatgtatggaagcataaaggttttgactttcatcgtttccactggaaaatctgatgtgaacagagcttgtggtgaagagagagttactccgcttcactgtgctgttgctggctgttctgtgaatatgattgaagtcatcaatgtcttgcttgatgcttctgctttggttaactctgttgatgctaatgggaatcaacctttggatgtgtttgttcgagtttcgaggtttgtggctagtccgaggaggaaagcggttgagttgttgctgagaggaggaggtgttggaggattgatcgatgaggcggttgaagaagagatcaagattgtctctaagtatccagctgatgcttctttaccggatataaacgaaggggtttatggaagtgatgagtttaggatgtatagctttaaggttaagccatgttctagggcttattctcatgattggaccgagtgtgcttttgttcatccgggagaaaatgcgaggaggagagatccgaggaagtatccttacacttgtgtcccctgtcccgagttccgtaaaggatcatgcccgaaaggagattcttgcgagtatgctcacggggttttcgagtcgtggcttcaccccgcgcagtataaaacccggctttgtaaagatgaaacgggttgtgcaaggaaagtttgtttctttgctcataaacgcgaagagatgagacctgttaatgcttcaactggctctgccgtggctcagtctccgtttagcagcttggagatgatgccagggttgtctcctcttgcttattcttcaggagtttcgactcctccggtttctccaatggctaatggtgttccttcctctccaagaaacggcggatcatggcagaacagagtcaatacccttactccaccggctttgcagctcaatggtggaagcagattgaagtccacactgagcgctagagatatcgatatggagatggagatggaattgagactccgcggttttggcaacaatgtggaagagacgttcgggtcttatgtttcctctccaagtaggaattctcaaatgggtcaaaacatgaaccaacattatccatcttccccggtgagacaaccgccatctcaacacgggttcgaatcttcagcagctgcagcggttgcagtgatgaaagcgagatcaaccgcctttgcgaaacgtagcttgagcttcaaaccagctactcaagcagcaccacagtcgaatctctcggattggggatctccaaacgggaagctggaatggggaatgaaaggagaagagctgaataagatgagaagaagtgtttcctttggaatccatggaaacaacaacaataacgcagctagagactacagggacgagccagatgtgtcatgggttaactctttagttaaagacagtactgtggtgtctgagagaagctttggaatgaatgagagggttcggataatgtcgtgggctgagcaaatgtacagagagaaggagcagactgtggtgtaaacacacacaaagatggtttcttatatatattgcttttgggccatctctgcaaatttgattctttaatttttgtgactttctttagttgttactgttattagtagtatatggtttgttgtcactacgagtctacgtgatgaaaagatagaagttaattgcattagtttctatattcgtttctcatcctcttgtaatttatcaaaccatgaaatggctaagcaatccaaaccgaaaaaaaaaaaaaaa

SEQ ID NO: 54 - DNA, 2193 bp, Oryza sativa
aatccgaaaagtttctgcaccgttttcaccccctaactaacaatatagggaacgtgtgctaaatataaaatgagaccttatatatgtagcgctgataactagaactatgcaagaaaaactcatccacctactttagtggcaatcgggctaaataaaaaagagtcgctacactagtttcgttttccttagtaattaagtgggaaaatgaaatcattattgcttagaatatacgttcacatctctgtcatgaagttaaattattcgaggtagccataattgtcatcaaactcttcttgaataaaaaaatctttctagctgaactcaatgggtaaagagagagattttttttaaaaaaatagaatgaagatattctgaacgtattggcaaagatttaaacatataattatataattttatagtttgtgcattcgtcatatcgcacatcattaaggacatgtcttactccatcccaatttttatttagtaattaaagacaattgacttatttttattatttatcttttttcgattagatgcaaggtacttacgcacacactttgtgctcatgtgcatgtgtgagtgcacctcctcaatacacgttcaactagcaacacatctctaatatcactcgcctatttaatacatttaggtagcaatatctgaattcaagcactccaccatcaccagaccacttttaataatatctaaaatacaaaaaataattttacagaatagcatgaaaagtatgaaacgaactatttaggtttttcacatacaaaaaaaaaaagaattttgctcgtgcgcgagcgccaatctcccatattgggcacacaggcaacaacagagtggctgcccacagaacaacccacaaaaaacgatgatctaacggaggacagcaagtccgcaacaaccttttaacagcaggctttgcggccaggagagaggaggagaggcaaagaaaaccaagcatcctcctcctcccatctataaattcctccccccttttcccctctctatataggaggcatccaagccaagaagagggagagcaccaaggacacgcgactagcagaagccgagcgaccgccttcttcgatccatatcttccggtcgagttcttggtcgatctcttccctcctccacctcctcctcacagggtatgtgcccttcggttgttcttggatttattgttctaggttgtgtagtacgggcgttgatgttaggaaaggggatctgtatctgtgatgattcctgttcttggatttgggatagaggggttcttgatgttgcatgttatcggttcggtttgattagtagtatggttttcaatcgtctggagagctctatggaaatgaaatggtttagggtacggaatcttgcgattttgtgagtaccttttgtttgaggtaaaatcagagcaccggtgattttgcttggtgtaataaaagtacggttgtttggtcctcgattctggtagtgatgcttctcgatttgacgaagctatcctttgtttattccctattgaacaaaaataatccaactttgaagacggtcccgttgatgagattgaatgattgattcttaagcctgtccaaaatttcgcagctggcttgtttagatacagtagtccccatcacgaaattcatggaaacagttataatcctcaggaacaggggattccctgttcttccgatttgctttagtcccagaattttttttcccaaatatcttaaaaagtcactttctggttcagttcaatgaattgattgctacaaataatgcttttatagcgttatcctagctgtagttcagttaataggtaatacccctatagtttagtcaggagaagaacttatccgatttctgatctccatttttaattatatgaaatgaactgtagcataagcagtattcatttggattattttttttattagctctcaccccttcattattctgagctgaaagtctggcatgaactgtcctcaattttgttttcaaattcacatcgattatctatgcattatcctcttgtatctacctgtagaagtttctttttggttattccttgactgcttgattacagaaagaaatttatgaagctgtaatcgggatagttatactgcttgttcttatgattcatttcctttgtgcagttcttggtgtagcttgccactttcaccagcaaagttc

SEQ ID NO: 55 - DNA, 1827 bp, Oryza sativa
gcttgagtcatagggagaaaacaaatcgatcatatttgactcttttccctccatctctcttaccggcaaaaaaagtagtactggtttatatgtaaagtaagattctttaattatgtgagatccggcttaatgcttttcttttgtcacatatactgcattgcaacaattgccatatattcacttctgccatcccattatatagcaactcaagaatggattgatatatcccctattactaatctagacatgttaaggctgagttgggcagtccatcttcccaacccaccaccttcgtttttcgcgcacatacttttcaaactactaaatggtgtgttttttaaaaatattttcaatacaaaagttgctttaaaaaattatattgatccatttttttaaaaaaaatagctaatacttaattaatcacgtgttaaaagaccgctccgttttgcgtgcaggagggataggttcacatcctgcattaccgaacacagcctaaatcttgttgtctagattcgtagtactggatatattaaatcatgttctaagttactatatactgagatgaatagaataagtaaaattagacccaccttaagtcttgatgaagttactactagctgcgtttgggaggacttcccaaaaaaaaaagtattagccattagcacgtgattaattaagtactagtttaaaaaacttaaaaaataaattaatatgattctcttaagtaactctcctatagaaaacttttacaaaattacaccgtttaatagtttggaaaatatgtcagtaaaaaataagagagtagaagttatgaaagttagaaaaagaattgttttagtagtatacagttataaactattccctctgttctaaaacataagggattatggatggattcgacatgtaccagtaccatgaatcgaatccagacaagttttttatgcatatttattctactataatatatcacatctgctctaaatatcttatatttcgaggtggagactgtcgctatgtttttctgcccgttgctaagcacacgccacccccgatgcggggacgcctctggccttcttgccacgataattgaatggaacttccacattcagattcgataggtgaccgtcgactccaagtgctttgcacaaaacaactccggcctcccggccaccagtcacacgactcacggcactaccacccctgactccctgaggcggacctgccactgttctgcatgcgaagctatctaaaattctgaagcaaagaaagcacagcacatgctccgggacacgcgccacccggcggaaaagggctcggtgtggcgatctcacagccgcatatcgcatttcacaagccgcccatctccaccggcttcacgaggctcatcgcggcacgaccgcgcacggaacgcacgcggccgacccgcgcgcctcgatgcgcgagcccatccgccgcgtcctccctttgcctttgccgctatcctctcggtcgtatcccgtttctctgtcttttgctccccggcgcgcgccagttcggagtaccagcgaaacccggacacctggtacacctccgccggccacaacgcgtgtccccctacgtggccgcgcagcacatgcccatgcgcgacacgtgcacctcctcatccaaactctcaagtctcaacggtcctataaatgcacggatagcctcaagctgctcgtcacaaggcaagaggcaagaggcaagagcatccgtattaaccagccttttgagacttgagagtgtgtgtgactcgatccagcgtagtttcagttcgtgtgttggtgagtgattccagccaagtttgcg

SEQ ID NO: 56 - DNA, 2194 bp, Oryza sativa
aatccgaaaagtttctgcaccgttttcaccccctaactaacaatatagggaacgtgtgctaaatataaaatgagaccttatatatgtagcgctgataactagaactatgcaagaaaaactcatccacctactttagtggcaatcgggctaaataaaaaagagtcgctacactagtttcgttttccttagtaattaagtgggaaaatgaaatcattattgcttagaatatacgttcacatctctgtcatgaagttaaattattcgaggtagccataattgtcatcaaactcttcttgaataaaaaaatctttctagctgaactcaatgggtaaagagagagattttttttaaaaaaatagaatgaagatattctgaacgtattggcaaagatttaaacatataattatataattttatagtttgtgcattcgtcatatcgcacatcattaaggacatgtcttactccatcccaatttttatttagtaattaaagacaattgacttatttttattatttatcttttttcgattagatgcaaggtacttacgcacacactttgtgctcatgtgcatgtgtgagtgcacctcctcaatacacgttcaactagcaacacatctctaatatcactcgcctatttaatacatttaggtagcaatatctgaattcaagcactccaccatcaccagaccacttttaataatatctaaaatacaaaaaataattttacagaatagcatgaaaagtatgaaacgaactatttaggtttttcacatacaaaaaaaaaaagaattttgctcgtgcgcgagcgccaatctcccatattgggcacacaggcaacaacagagtggctgcccacagaacaacccacaaaaaacgatgatctaacggaggacagcaagtccgcaacaaccttttaacagcaggctttgcggccaggagagaggaggagaggcaaagaaaaccaagcatcctccttctcccatctataaattcctccccccttttcccctctctatataggaggcatccaagccaagaagagggagagcaccaaggacacgcgactagcagaagccgagcgaccgccttctcgatccatatcttccggtcgagttcttggtcgatctcttccctcctccacctcctcctcacagggtatgtgcctcccttcggttgttcttggatttattgttctaggttgtgtagtacgggcgttgatgttaggaaaggggatctgtatctgtgatgattcctgttcttggatttgggatagaggggttcttgatgttgcatgttatcggttcggtttgattagtagtatggttttcaatcgtctggagagctctatggaaatgaaatggtttagggatcggaatcttgcgattttgtgagtaccttttgtttgaggtaaaatcagagcaccggtgattttgcttggtgtaataaagtacggttgtttggtcctcgattctggtagtgatgcttctcgatttgacgaagctatcctttgtttattccctattgaacaaaaataatccaactttgaagacggtcccgttgatgagattgaatgattgattcttaagcctgtccaaaatttcgcagctggcttgtttagatacagtagtccccatcacgaaattcatggaaacagttataatcctcaggaacaggggattccctgttcttccgatttgctttagtcccagaattttttttcccaaatatcttaaaaagtcactttctggttcagttcaatgaattgattgctacaaataatgcttttatagcgttatcctagctgtagttcagttaataggtaatacccctatagtttagtcaggagaagaacttatccgatttctgatctccatttttaattatatgaaatgaactgtagcataagcagtattcatttggattattttttttattagctctcaccccttcattattctgagctgaaagtctggcatgaactgtcctcaattttgttttcaaattcacatcgattatctatgcattatcctcttgtatctacctgtagaagtttctttttggttattccttgactgcttgattacagaaagaaatttatgaagctgtaatcgggatagttatactgcttgttcttatgattcatttcctttgtgcagttcttggtgtagcttgccactttcaccagcaaagttc

SEQ ID NO: 57 - protein, 46 aa, Artificial sequence
  SNH domain
  VARIANT (3)..(3): /replace = "Lys"
  UNSURE (4)..(4): Xaa can be any naturally occurring amino acid
  VARIANT (6)..(6): /replace = "Glu"
  VARIANT (7)..(7): /replace = "Asp"
  VARIANT (9)..(9): /replace = "Asn"
  UNSURE (10)..(10): Xaa can be any naturally occurring amino acid
  UNSURE (13)..(13): Xaa can be any naturally occurring amino acid
  VARIANT (14)..(14): /replace = "Ala" /replace = "Lys"
  VARIANT (16)..(16): /replace = "Val" /replace = "Met"
  VARIANT (17)..(17): /replace = "Asp" /replace = "Ser"
  VARIANT (18)..(18): /replace = "Asn"
  VARIANT (19)..(19): /replace = "Leu"
  UNSURE (21)..(21): Xaa can be any naturally occurring amino acid
  VARIANT (23)..(23): /replace = "Arg"
  UNSURE (24)..(25): Xaa can be any naturally occurring amino acid
  VARIANT (28)..(28): /replace = "Asp" /replace = "Ser"
  UNSURE (29)..(30): Xaa can be any naturally occurring amino acid
  VARIANT (32)..(32): /replace = "Ser" /replace = "Gln"
  UNSURE (33)..(33): Xaa can be any naturally occurring amino acid
  VARIANT (35)..(35): /replace = "His"
  UNSURE (36)..(36): Xaa can be any naturally occurring amino acid
  VARIANT (39)..(39): /replace = "Leu" /replace = "Val"
  VARIANT (43)..(43): /replace = "Thr"
IQQXLDENKXLIXCILESQNXGKXXECAXXQAXLQXNLMYLAAIAD

SEQ ID NO: 58 - protein, 46 aa, Arabidopsis thaliana
IQQYLDENKSLILKIVESQNSGKLSECAENQARLQRNLMYLAAIAD

SEQ ID NO: 59 - DNA, 633 bp, Arabidopsis thaliana
atgcaacagcacctgatgcagatgcagcccatgatggctggttactaccccagcaatgttacctctgatcatatccaacagtacttggacgaaaacaaatcgttgattctgaagattgttgagtctcaaaactctggaaagcttagcgaatgcgccgagaatcaagcaaggcttcaacgcaacctaatgtacctagctgcaatagcagattctcagcctcagccaccaagtgtgcatagccagtatggatctgctggtggtgggatgattcagggagaaggagggtcacactatttgcagcagcaacaagcgactcaacagcaacagatgactcagcagtctctaatggcggctcgatcttcaatgttgtatgctcagcaacagcagcagcagcagccttacgcgacgcttcagcatcagcaattgcaccatagccagcttggaatgagctcgagcagcggaggaggaggaagcagtggtctccatatccttcagggagaggctggtgggtttcatgattttggccgtgggaagccggaaatgggaagtggtggtggcggtgaaggcagaggaggaagttcaggggatggtggagaaaccctttacttgaaatcatcagatgatgggaattga

SEQ ID NO: 60 - protein, 210 aa, Arabidopsis thaliana
MQQHLMQMQPMMAGYYPSNVTSDHIQQYLDENKSLILKIVESQNSGKLSECAENQARLQRNLMYLAAIADSQPQPPSVHSQYGSAGGGMIQGEGGSHYLQQQQATQQQQMTQQSLMAARSSMLYAQQQQQQQPYATLQHQQLHHSQLGMSSSSGGGGSSGLHILQGEAGGFHDFGRGKPEMGSGGGGEGRGGSSGDGGETLYLKSSDDGN

SEQ ID NO: 61 - DNA, 588 bp, Arabidopsis thaliana
atgcagcagcagcagtctccgcaaatgtttccgatggttccgtcgattccccctgctaacaacatcactaccgaacagatccaaaagtaccttgatgagaacaagaagctgattatggccatcatggaaaaccagaatctcggtaaacttgctgagtgcgcccagtaccaagctcttctccagaagaacttgatgtatcttgctgcaattgctgatgctcaacccccaccacctacgccaggaccttcaccatctacagctgtcgctgcccagatggcaacaccgcattctgggatgcaaccacctagctacttcatgcaacacccacaagcatcccctgcagggattttcgctccaaggggtcctttacagtttggtagcccactccagtttcaggatccgcaacagcagcagcagatacatcagcaagctatgcaaggacacatggggattagaccaatgggtatgaccaacaacgggatgcagcatgcgatgcaacaaccagaaaccggtcttggaggaaacgtggggcttagaggaggaaagcaagatggagcagatggacaaggaaaagatgatggcaagtga

SEQ ID NO: 62 - protein, 195 aa, Arabidopsis thaliana
MQQQQSPQMFPMVPSIPPANNITTEQIQKYLDENKKLIMAIMENQNLGKLAECAQYQALLQKNLMYLAAIADAQPPPPTPGPSPSTAVAAQMATPHSGMQPPSYFMQHPQASPAGIFAPRGPLQFGSPLQFQDPQQQQQIHQQAMQGHMGIRPMGMTNNGMQHAMQQPETGLGGNVGLRGGKQDGADGQGKDDGK

SEQ ID NO: 63 - DNA, 672 bp, Arabidopsis thaliana
atgcagcaatctccacagatgattccgatggttcttccttcatttccgcccaccaataatatcaccaccgaacagatccaaaagtatcttgatgagaacaagaagctgataatggcgatcttggaaaatcagaacctcggtaaacttgcagaatgtgctcagtatcaagctcttctccagaagaatttgatgtatctcgctgcaattgcggatgctcaacctcagccaccagcagctacactaacatcaggagccatgactccccaagcaatggctcctaatccgtcatcaatgcagccaccaccaagctacttcatgcagcaacatcaagctgtgggaatggctcaacaaatacctcctgggattttccctcctagaggtccattgcaatttggtagcccgcatcagtttctggatccgcagcaacagttacatcaacaagctatgcaagggcacatggggattagaccaatgggtttgaataataacaacggactgcaacatcaaatgcaccaccatgaaactgctcttgccgcaaacaatgcgggtcctaacgatgctagtggaggaggtaaaccggatgggaccaatatgagccagagtggagctgatgggcaaggtggctcagccgctagacatggcggtggtgatgcaaaaactgaaggaaaatga

SEQ ID NO: 64 - protein, 223 aa, Arabidopsis thaliana
MQQSPQMIPMVLPSFPPTNNITTEQIQKYLDENKKLIMAILENQNLGKLAECAQYQALLQKNLMYLAAIADAQPQPPAATLTSGAMTPQAMAPNPSSMQPPPSYFMQQHQAVGMAQQIPPGIFPPRGPLQFGSPHQFLDPQQQLHQQAMQGHMGIRPMGLNNNNGLQHQMHHHETALAANNAGPNDASGGGKPDGTNMSQSGADGQGGSAARHGGGDAKTEGK

SEQ ID NO: 65 - DNA, 633 bp, Aspergillus officinalis
atgcagcagcacctgatgcagatgcagcccatgatggcaacctacggttcaccgaatcaggtcaccaccgatatcattcagcagtatctggacgagaacaagcagttgattctggctattcttgaaaaccaaaattcaggaaaagctgatgaatgtgctgagaatcaggctaagcttcagaggaatctgatgtatcttgcagccattgcggatagccagccccaagttcctaccattgctcagtatcctcccaacgctgttgctgctatgcaatcgagtgctcgctacatgcaacaacaccaagcagctcaacagatgacccctcaatctctcatggctgctcgctcctcaatgctctactcacagtccccaatgtctgcactccagcagcaacagcagcaagcagcaatgcatagccagctcgccatgagctccggaggcaacaacagcagcaccggaggattcaccattcttcatggtgaagctagcataggaggcaatggctcaatgaattctggtggagtctttggagattttggacggagcagcggtgggaagcaagagactgggagcgaagggcacgggacagagactcctatgtacctgaaaggctctgaagaagaaggaaactga

SEQ ID NO: 66 - protein, 210 aa, Aspergillus officinalis
MQQHLMQMQPMMATYGSPNQVTTDIIQQYLDENKQLILAILENQNSGKADECAENQAKLQRNLMYLAAIADSQPQVPTIAQYPPNAVAAMQSSARYMQQHQAAQQMTPQSLMAARSSMLYSQSPMSALQQQQQQAAMHSQLAMSSGGNNSSTGGFTILHGEASIGGNGSMNSGGVFGDFGRSSGGKQETGSEGHGTETPMYLKGSEEEGN

SEQ ID NO: 67 - DNA, 591 bp, Brassica napus
atgcagcccatgatggctggttactaccccagcaatgtcacctctgatcatatccagcagtacttggatgagaacaagtctttgattctgaagatagttgagtctcaaaactcaggaaagctcagcgagtgtgccgagaatcaggcaaggcttcaacgcaacctcatgtacttggctgcaatagcagattctcagcctcaacctccaagcgtgcatagccagtatggatctgctggtggtgggttgattcagggagaaggagcgtcacactatttgcagcagcaacaggcgactcaacagcagcagatgactcagcagtctcttatggcagctcgttcttcaatgatgtatcagcagcagcaacagccttatgcaacgcttcagcatcagcagttgcaccatagccagcttgggatgagctctagcagcggaggaggaagcagtggtctccatatccttcagggagaggctggtgggtttcatgaatttggccgtgggaagccggagatgggaagtggtgaaggcaggggtggaagctcaggggatggtggagaaacactctacttgaagtcatcagatgatgggaactga

SEQ ID NO: 68 - protein, 203 aa, Brassica napus
MQQHLMQMQPMMAGYYPSNVTSDHIQQYLDENKSLILKIVESQNSGKLSECAENQARLQRNLMYLAAIADSQPQPPSVHSQYGSAGGGLIQGEGASHYLQQQQATQQQQMTQQSLMAARSSMMYQQQQQPYATLQHQQLHHSQLGMSSSSGGGSSGLHILQGEAGGFHEFGRGKPEMGSGEGRGGSSGDGGETLYLKSSDDGN

SEQ ID NO: 69 - DNA, 663 bp, Citrus sinensis
atgcaacagcacctgatgcagatgcagcccatgatggcagcttattatcccaacaacgtcactactgaccacattcaacagtatctagatgagaacaaatcattgattttgaagattgttgagagccagaattcagggaaactgagcgagtgtgcagagaaccaggcaagattgcagcggaatctcatgtacctggctgctattgctgatgctcaaccccaaccacctagcgttcatgcccagttctcttctggtggcattatgcagccaggagctcactatatgcaacaccagcaatctcagccaatgacaccacagtcacttatggctgcacgctcatccatggtgtactctcaacagcaattttcagtgcttcagcaacagcaagccttgcatggtcagcttggcatgagctctggtggtagctcaggacttcacatgctgcaaagtgagggtagtactgcaggaggtagtggttcacttgggggtgggggattccctgattttggccgtggctcatctggtgaaggcttgcactcaaggggaatggggagcaagcatgatataggcagttctggatctgctgaaggacgaggagggagctcaggaagccaagatggaggcgaaactctctacttgaaaggggctgatgatggaaattaa

SEQ ID NO: 70 - protein, 219 aa, Citrus sinensis
MQQHLMQMQPMMAAYYPNNVTTDHIQQYLDENKSLILKIVESQNSGKLSECAENQARLQRNLMYLAAIADAQPQPPSVHAQFSSGGIMQPGAHYMQHQQSQPMTPQSLMAARSSMVYSQQQFSVLQQQQALHGQLGMSSGGSSGLHMLQSEGSTAGGSGSLGGGGFPDFGRGSSGEGLHSRGMGSKHDIGSSGSAEGRGGSSGSQDGGETLYLKGADDG

SEQ ID NO: 71 - DNA, 660 bp, Gossypium arboreum
  misc_feature (309)..(309): n is a, c, g, or t
atgcagcagcacctgatgcagatgcagcccatgatggcagcttattatcccaacaacgtcactactgatcatattcaacagtatctcgatgagaacaagtcattgatcttaaagattgttgagagccagaattctgggaaattgagtgaatgtgctgagaaccaagcaaggctgcagcgaaacctcatgtacctggctgccattgcggattctcaaccccaaccacccaccgtgcatgcacagtttccatctggtggtatcatgcagcaaggagctgggcactacatgcagcaccaacaagctcaacanatgacacaacagtcgcttatggctgctcggtcctcaatgttgtattctcagcaaccattttctgcactgcaacaacaacaacaacaaggctttgcacagtcagcttggcatgagctctggcgggagcacaggcctttcatatgctgcaaactgaatctagtactgcagggggcagtgagacaccttgggcccgagggttgtcctgatttggacgggggtcttttggagaggcatccctggtggcaggccaatggccgggggaacaaccaaaaatccggggaggccggctcacctaagggccgggaggagcccttggggcaggggggggtgatggggggaacctcttcttaa

SEQ ID NO: 72 - protein, 219 aa, Gossypium arboreum
  UNSURE (103)..(103): Xaa can be any naturally occurring amino acid
MQQHLMQMQPMMAAYYPNNVTTDHIQQYLDENKSLILKIVESQNSGKLSECAENQARLQRNLMYLAAIADSQPQPPTVHAQFPSGGIMQQGAGHYMQHQQAQXMTQQSLMAARSSMLYSQQPFSALQQQQQQGFAQSAWHELWREHRPFICCKLNLVLQGAVRHLGPEGCPDLDGGLLERHPWWQANGRGNNQKSGEAGSPKGREEPLGQGGVMGGTSS

SEQ ID NO: 73 - DNA, 636 bp, Medicago trunculata
atgcagcagcacctgatgcagatgcagcccatgatggcagcttactatcctaacaacgtcactactgatcatattcaacagtatcttgatgagaacaagtccttgattctcaagattgttgaaagccagaacactggcaagctcaccgagtgtgctgagaaccaatcaaggcttcagagaaatctcatgtacctagctgcaatagctgattctcaaccccaaccacctactatgcctggccagtacccttcaagtggaatgatgcagcagggaggacactacatgcaggctcaacaagctcagcagatgacacaacaacaattaatggctgcacgttcctctcttatgtatgctcaacagcttcaacagcagcaagccttgcaaagccaacttggtatgaattccagtggaagtcaaggccttcacatgttgcatagtgaaggggctaatgttggaggcaattcatctctaggggctggttttcctgattttggccgtagctcagccggtgatggtttgcacggcagtggtaagcaagacattggaagcactgatggccgcggtggaagctctagtggtcactctggtgatggcggcgaaacactttacctgaaatcttctggtgatgggaattag

SEQ ID NO: 74 - protein, 211 aa, Medicago trunculata
MQQHLMQMQPMMAAYYPNNVTTDHIQQYLDENKSLILKIVESQNTGKLTECAENQSRLQRNLMYLAAIADSQPQPPTMPGQYPSSGMMQQGGHYMQAQQAQQMTQQQLMAARSSLMYAQQLQQQQALQSQLGMNSSGSQGLHMLHSEGANVGGNSSLGAGFPDFGRSSAGDGLHGSGKQDIGSTDGRGGSSSGHSGDGGETLYLKSSGDGN

SEQ ID NO: 75 - DNA, 684 bp, Oryza sativa
atgcagcagcaacacctgatgcagatgaaccagggcatgatggggggatatgcttcccctaccaccgtcaccactgatctcattcagcagtatctggatgagaacaagcagctgatcctggccatccttgacaaccagaacaatgggaaggtggaagagtgcgctcggaaccaagctaagctccagcacaatctcatgtacctcgccgccatcgccgacagccagccgccgcagacggccgccatgtcccagtatccgtcgaacctgatgatgcagtccggggcgaggtacatgccgcagcagtcggcgcagatgatggcgccgcagtcgctgatggcggcgaggtcttcgatgatgtacgcgcagccggcgctgtcgccgctccagcagcagcagcagcagcaggcggcggcggcgcacgggcagctgggcatgggctcggggggcaccaccagcgggttcagcatcctccacggcgaggccagcatgggcggcggcggcggcggcggtggcgccggtaacagcatgatgaacgccggcgtgttctccgacttcggacgcggcggcggcggcggcggcaaggaggggtccacctcgctgtccgtcgacgtccggggcgccaactccggcgcccagagcggcgacggggagtacctcaagggcaccgaggaggaaggcagctag

SEQ ID NO: 76 - protein, 227 aa, Oryza sativa
MQQQHLMQMNQGMMGGYASPTTVTTDLIQQYLDENKQLILAILDNQNNGKVEECARNQAKLQHNLMYLAAIADSQPPQTAAMSQYPSNLMMQSGARYMPQQSAQMMAPQSLMAARSSMMYAQPALSPLQQQQQQQAAAAHGQLGMGSGGTTSGFSILHGEASMGGGGGGGGAGNSMMNAGVFSDFGRGGGGGGKEGSTSLSVDVRGANSGAQSGDGEYLKGTEEEGS

SEQ ID NO: 77 - DNA, 558 bp, Oryza sativa
atgcagcagcagccgatgccgatgcccgcgcaggcgccgccgacggccggaatcaccaccgagcagatccaaaagtatctggatgaaaacaagcagcttattttggctattttggaaaatcagaatctgggaaagttggcagaatgtgctcagtatcaagcgcagcttcagaagaatctcttgtacttggctgcaattgctgatactcaaccgcagaccactataagccgtccccagatggtgccgcatggtgcatcgccggggttaggggggcaatacatgtcgcaggtgccaatgttcccccccaggacccctctaacgccccagcagatgcaggagcagcagctgcagcaacagcaagcccagctgctctcgttcggcggtcagatggttatgaggcctggcgttgtgaatggcattcctcagcttctgcaaggcgaaatgcaccgcggagcagatcaccagaacgctggcggggccacctcggagccttccgagagccacaggagcaccggcaccgaaaatgacggtggaagcgacttcggcgatcaatcctaa

SEQ ID NO: 78 - protein, 185 aa, Oryza sativa
MQQQPMPMPAQAPPTAGITTEQIQKYLDENKQLILAILENQNLGKLAECAQYQAQLQKNLLYLAAIADTQPQTTISRPQMVPHGASPGLGGQYMSQVPMFPPRTPLTPQQMQEQQLQQQQAQLLSFGGQMVMRPGVVNGIPQLLQGEMHRGADHQNAGGATSEPSESHRSTGTENDGGSDFGDQS

SEQ ID NO: 79 - DNA, 618 bp, Oryza sativa
atgcagcagcagatggccatgccggcgggggccgccgccgccgcggtgccgccggcggccggcatcaccaccgagcagatccaaaagtatttggatgaaaataaacagctaattttggccatcctggaaaatcaaaacctagggaagttggctgaatgtgctcagtaccaagctcagcttcaaaagaatctcttgtatctggctgccattgcagatgcccaaccacctcagaatccaggaagtcgccctcagatgatgcagcctggtgctaccccaggtgctgggcattacatgtcccaagtaccgatgttccctccaagaactcccttaaccccacaacagatgcaagagcagcagcagcagcaactccagcaacagcaagctcaggctctagccttccccggccagatgctaatgagaccaggtactgtcaatggcatgcaatctatcccagttgctgaccctgctcgcgcagccgatcttcagacggcagcaccgggctcggtagatggccgaggaaacaagcaggatgcaacctcggagccttccgggaccgagagccacaagagtgcgggagcagataacgacgcaggcggtgacatagcggagaagtcctga

SEQ ID NO: 80 - protein, 205 aa, Oryza sativa
MQQQMAMPAGAAAAAVPPAAGITTEQIQKYLDENKQLILAILENQNLGKLAECAQYQAQLQKNLLYLAAIADAQPPQNPGSRPQMMQPGATPGAGHYMSQVPMFPPRTPLTPQQMQEQQQQQLQQQQAQALAFPGQMLMRPGTVNGMQSIPVADPARAADLQTAAPGSVDGRGNKQDATSEPSGTESHKSAGADNDAGGDIAEKS

SEQ ID NO: 81 - DNA, 540 bp, Solanum tuberosum
atgcagcagcagcacctgatgcagatgcagcccatgatggcagcctattatcccaacaatgtcactactgatcatattcaacagttcctggatgagaacaaatcacttattctgaagattgttgagagccagaactctgggaaaataagtgaatgtgcagagtcccaagctaaacttcagagaaatcttatgtaccttgcagctattgctgattcacagccccagcctcctagtatgcattcacagttagcttctggtgggatgatgcagggaggggcacattatatgcagcaacaacaagctcaacaactcacaacgcaatcgcttatggctgcagcaagatcctcctcctcaatgctctatggacaacaacaacaacaacaacaacaacaactatcatcattgcaacaacagcaagcagcctttcatagccagcaactcggaatgagcagctctggtggaggaagcagtagtggacttcacatgctacaaagcgaaaacactcatagtgctagcactggtggtgggtggtttccctga

SEQ ID NO: 82 - protein, 179 aa, Solanum tuberosum
MQQQHLMQMQPMMAAYYPNNVTTDHIQQFLDENKSLILKIVESQNSGKISECAESQAKLQRNLMYLAAIADSQPQPPSMHSQLASGGMMQGGAHYMQQQQAQQLTTQSLMAAARSSSSMLYGQQQQQQQQQLSSLQQQQAAFHSQQLGMSSSGGGSSSGLHMLQSENTHSASTGGGWFP

SEQ ID NO: 83 - DNA, 684 bp, Zea mays
atgcagcagcaacacctgatgcagatgaaccagaacatgatggggggctacacctctcctgccgccgtgaccaccgatctcatccagcagcacctggacgagaacaagcagctgatcctggccatcctcgacaaccagaacaatggcaaggcggaggagtgcgaacggcaccaagctaagctccagcacaacctcatgtacctggccgccatcgctgacagccagccgccacagaccgcgccactatcacagtacccgtccaacctgatgatgcagccgggccctcggtacatgccaccgcagtccgggcagatgatgaacccgcagtcgctgatggcggcgcggtcctccatgatgtacgcgcacccgtccctgtcgccactccagcagcagcaggcggcgcacggacagctgggtatggctccagggggcggcggtggcggcacgaccagcgggttcagcatcctccacggcgaggccagcatgggcggtggtggtgctggcgcaggcgccggcaacaacatgatgaacgccggcatgttctcgggctttggccgcagcggcagtggcgccaaggaagggtcgacctctctgtcggttgacgtccggggtggaaccagctccggcgcgcagagcggggacggcgagtacctcaaagtcggcaccgaggaagaaggcagttag

SEQ ID NO: 84 - protein, 227 aa, Zea mays
MQQQHLMQMNQNMMGGYTSPAAVTTDLIQQHLDENKQLILAILDNQNNGKAEECERHQAKLQHNLMYLAAIADSQPPQTAPLSQYPSNLMMQPGPRYMPPQSGQMMNPQSLMAARSSMMYAHPSLSPLQQQQAAHGQLGMAPGGGGGGTTSGFSILHGEASMGGGGAGAGAGNNMMNAGMFSGFGRSGSGAKEGSTSLSVDVRGGTSSGAQSGDGEYLKVGTEEEGS

SEQ ID NO: 85 - DNA, 549 bp, Zea mays
atgcagcagccgatgcacatgcagccacaggcgccggcgataaccccagctgccggaatcagcacggagcagatccaaaagtatctggatgagaataagcagcttattttggctattttggaaaatcagaacctaggaaaattggcagaatgtgctcagtatcaatcacaacttcagaagaacctcttgtatctcgctgcaatcgcagatgctcaaccgcagactgctgtaagccgccctcagatggcgccgcctggtggatcgcctggagtagggcagtacatgtcacaggtgcctatgttcccaccgaggacacctcttacaccccagcagatgcaggagcagcagcttcagcagcagcaggctcagttgctaaacttcagtggccaaatggttgctagaccaggcatggtcaacggcatggctcagtccatgcaagctcagctaccaccgggtgtgaacaagcaggatgctggtggggtcgcctctgagccctcgggcaccgagagccacaggagcactggtggtgacgatggtggaagcgactag

SEQ ID NO: 86 - protein, 182 aa, Zea mays
MQQPMHMQPQAPAITPAAGISTEQIQKYLDENKQLILAILENQNLGKLAECAQYQSQLQKNLLYLAAIADAQPQTAVSRPQMAPPGGSPGVGQYMSQVPMFPPRTPLTPQQMQEQQLQQQQAQLLNFSGQMVARPGMVNGMAQSMQAQLPPGVNKQDAGGVASEPSGTESHRSTGGDDGGSD

SEQ ID NO: 87 - DNA, 1173 bp, Homo sapiens
atgggcggcaacatgtctgtggctttcgcggccccgaggcagcgaggcaagggggagatcactcccgctgcgattcagaagatgttggatgacaataaccatcttattcagtgtataatggactctcagaataaaggaaagacctcagagtgttctcagtatcagcagatgttgcacacaaacttggtataccttgctacaatagcagattctaatcaaaatatgcagtctcttttaccagcaccacccacacagaatatgcctatgggtcctggagggatgaatcagagcggccctcccccacctccacgctctcacaacatgccttcagatggaatggtaggtgggggtcctcctgcaccgcacatgcagaaccagatgaacggccagatgcctgggcctaaccatatgcctatgcagggacctggacccaatcaactcaatatgacaaacagttccatgaatatgccttcaagtagccatggatccatgggaggttacaaccattctgtgccatcatcacagagcatgccagtacagaatcagatgacaatgagtcagggacaaccaatgggaaactatggtcccagaccaaatatgagtatgcagccaaaccaaggtccaatgatgcatcagcagcctccttctcagcaatacaatatgccacagggaggcggacagcattaccaaggacagcagccacctatgggaatgatgggtcaagttaaccaaggcaatcatatgatgggtcagagacagattcctccctatagacctcctcaacagggcccaccacagcagtactcaggccaggaagactattacggggaccaatacagtcatggtggacaaggtcctccagaaggcatgaaccagcaatattaccctgatggaaattcacagtatggccaacagcaagatgcataccagggaccacctccacaacagggatatccaccccagcagcagcagtacccagggcagcaaggttacccaggacagcagcagggctacggtccttcacagggtggtccaggtcctcagtatcctaactacccacagggacaaggtcagcagtatggaggatatagaccaacacagcctggaccaccacagccaccccagcagaggccttatggatatgaccagggacagtatggaaattaccagcag

SEQ ID NO: 88 - protein, 391 aa, Homo sapiens
MGGNMSVAFAAPRQRGKGEITPAAIQKMLDDNNHLIQCIMDSQNKGKTSECSQYQQMLHTNLVYLATIADSNQNMQSLLPAPPTQNMPMGPGGMNQSGPPPPPRSHNMPSDGMVGGGPPAPHMQNQMNGQMPGPNHMPMQGPGPNQLNMTNSSMNMPSSSHGSMGGYNHSVPSSQSMPVQNQMTMSQGQPMGNYGPRPNMSMQPNQGPMMHQQPPSQQYNMPQGGGQHYQGQQPPMGMMGQVNQGNHMMGQRQIPPYRPPQQGPPQQYSGQEDYYGDQYSHGGQGPPEGMNQQYYPDGNSQYGQQQDAYQGPPPQQGYPPQQQQYPGQQGYPGQQQGYGPSQGGPGPQYPNYPQGQGQQYGGYRPTQPGPPQPPQQRPYGYDQGQYGNYQQ

SEQ ID NO: 89 - DNA, 627 bp, Allium cepa
atgcagcagccgcagccagcgatgggaaccatgggctcggtgccacctactagcatcaccaccgaacagattcaaaggtacttggatgagaacaaacagttaatattggcaattttggataatcaaaatttaggaagactgaatgagtgtgctcaatatcaagctcagcttcaaaagaatctgctttacctggcagcaatagctgatgctcagcctcagtctcctgcggtgcgtctgcagatgatgcctcaaggtgcagctgccacgcctcaagctggaaaccaatttatgcagcagcagagccctaatttccctcccaaaacaggaatgcaatttactcctcaacaagtacaagaattgcagcagcaacagctacaacatcagccacatatgatgcctccatttcaaggtcaaatgggtatgagacctatgaatggaatgcaggcagcaatgcatgcagattcatctcttgcttataacactaacaataagcaagatgcaggaaacgcagcttatgaaaatactgctgccaacacagatggttccattcaaaagaaaacagcaaatgatgatttagacccttctgcagcaaaccctagaaggtctgaagatgccaaatcatcatga

SEQ ID NO: 90 - protein, 208 aa, Allium cepa
MQQPQPAMGTMGSVPPTSITTEQIQRYLDENKQLILAILDNQNLGRLNECAQYQAQLQKNLLYLAAIADAQPQSPAVRLQMMPQGAAATPQAGNQFMQQQSPNFPPKTGMQFTPQQVQELQQQQLQHQPHMMPPFQGQMGMRPMNGMQAAMHADSSLAYNTNNKQDAGNAAYENTAANTDGSIQKKTANDDLDPSAANPRRSEDAKSS

SEQ ID NO: 91 - DNA, 633 bp, Aquilegia formosa x Aquilegia pubescens
atgcaacacatgcagatgcagcccatgatgccaccttatagtgccaacagcgtcactactgatcatatccaacagtacttggatgaaaataaggcgttgattctgaagatacttgagaaccaaaattcgggaaaagttagtgaatgtgcagagaaccaagcaagacttcaacgaaatcttatgtatctggctgcaattgctgattctcaaccacagcctcccaatatgcatgctcagtactctaatgcgggtataccacctggtgcacattacctacaacaccaacaggcccaacagatgacacaacagtcgctcatggctgctcgatcaaatatgctgtatgctcagccaatcacaggaatgcagcaacagcaagcaatgcatagccagcttggcatgagctctggtggtaacagtggactccacatgatgcacaatgagggcagcatgggaggtagtggggcacttggaagctattctgattatggccgtggcagtggtggtggagtaactatcgctagcaaacaagatggtggaagtggttctggtgaaggacgaggtggaaactctggaggccaaagtgcagatggaggtgaatctctttacctgaaaaacagtgacgaagggaactaa

SEQ ID NO: 92 - protein, 210 aa, Aquilegia formosa x Aquilegia pubescens
MQHMQMQPMMPPYSANSVTTDHIQQYLDENKALILKILENQNSGKVSECAENQARLQRNLMYLAAIADSQPQPPNMHAQYSNAGIPPGAHYLQHQQAQQMTQQSLMAARSNMLYAQPITGMQQQQAMHSQLGMSSGGNSGLHMMHNEGSMGGSGALGSYSDYGRGSGGGVTIASKQDGGSGSGEGRGGNSGGQSADGGESLYLKNSDEGN

SEQ ID NO: 93 - DNA, 615 bp, Brachypodium distachyon
atgcagcaggcgatgtccatgtccccggggtcggccggcgcggtgccgcctccggccggcatcaccacagagcagatccaaaagtatttggatgaaaataagcaacttattttggccatcctggaaaatcagaacctaggaaagttgactgaatgtgctcagtatcaagctcaacttcagaagaatctcttgtatctggctgccattgcggatgcccaaccaccacagaaccctggaagtcgcccccagatggtgcagcctggtggtatgccaggtgcagggcattacatgtcgcaagtaccaatgttccctccaagaacccctttaaccccacaacagatgcaagagcaacagcaccagcagcttcagcagcagcaagcacaggctcttgctttccccagccagatggtcatgagaccaggtactgtgaacggcatgcagcctatgcaagctgatctccaagcagcagcagcagcacctggcctggcagacagccgaggaagtaagcaggacgcagcggtagctggggccatctcggaaccttctggcaccgagagtcacaagagtacaggagcggatcatgaggcaggtggcgatgtagctgagcaatcctaa

SEQ ID NO: 94 - protein, 204 aa, Brachypodium distachyon
MQQAMSMSPGSAGAVPPPAGITTEQIQKYLDENKQLILAILENQNLGKLTECAQYQAQLQKNLLYLAAIADAQPPQNPGSRPQMVQPGGMPGAGHYMSQVPMFPPRTPLTPQQMQEQQHQQLQQQQAQALAFPSQMVMRPGTVNGMQPMQADLQAAAAAPGLADSRGSKQDAAVAGAISEPSGTESHKSTGADHEAGGDVAEQS

SEQ ID NO: 95 - DNA, 636 bp, Brassica napus
atgcagcagcagcagcagcagcagcagcagcctccgcaaatgtttccgatggctccttcgatgccgccaactaacatcaccaccgaacagatccaaaagtaccttgaggagaacaagaagctgataatggcaatcatggaaaatcagaatcttggcaagcttgcagagtgtgcacagtaccaagctcttctccagaagaacttaatgtacctcgctgctattgctgatgctcaacctcctccatctaccgctggagctacaccaccaccagctatggcttcccagatgggggcaccgcatcctgggatgcaaccgccgagctactttatgcaacacccacaagcttcagggatggctcaacaagcaccacccgctggtatcttccctccgagaggtcctttgcagtttggtagcccacaccagcttcaggatccgcaacagcagcatatgcatcaacaggctatgcaaggacacatggggatgcgaccaatgggtatcaacaacaacaatgggatgcagcatcagatgcagcaacaacaaccagaaacctctcttggaggaagcgctgcaaacgtggggcttagaggtggaaagcaagatggagcagatggacaaggaaaagatgatggcaaatga

SEQ ID NO: 96 - protein, 203 aa, Brassica napus; identical to SEQ ID NO: 68

SEQ ID NO: 97 - DNA, 636 bp, Citrus sinensis
atgcagcagccaccgcaaatgatccctgttatgccttcatttccacccaccaacatcaccacagagcagattcaaaagtaccttgatgagaacaaaaagttgattttggcaattttggacaatcaaaatcttggaaagcttacagaatgtgcccactatcaagctcagcttcaaaagaatttaatgtatttagctgcaattgctgatgcacaaccacaagcaccaacaatgcctcctcagatggctccacatcctgcaatgcaagctagtgggtattacatgcaacatcctcaggcggcagcaatggctcagcaacaaggaatctttccccaaaagatgccattacaattcaataaccctcatcaactacaggatcctcaacagcagctacaccaacatcaagccatgcaagcacaaatgggaatgagaccgggtgccactaacaatggtatgcatcccatgcatgctgaaagctctcttggaggtggcagcagtggaggacccccttcagcatcaggcccaggtgacatacgtggtggaaataagcaagatgcctcggaggctgggactactggtgctgatggccagggcagttcggctggtgggcatggtggggatggagaggaggcaaagtga

SEQ ID NO: 98 - protein, 211 aa, Citrus sinensis
MQQPPQMIPVMPSFPPTNITTEQIQKYLDENKKLILAILDNQNLGKLTECAHYQAQLQKNLMYLAAIADAQPQAPTMPPQMAPHPAMQASGYYMQHPQAAAMAQQQGIFPQKMPLQFNNPHQLQDPQQQLHQHQAMQAQMGMRPGATNNGMHPMHAESSLGGGSSGGPPSASGPGDIRGGNKQDASEAGTTGADGQGSSAGGHGGDGEEAK

SEQ ID NO: 99 - DNA, 597 bp, Euphorbia esula
atgcagcagcaaccgcagatgatgcctatgatgccttcatatccaccagcaaacattaccacggagcaaatccaaaagtatcttgatgaaaataaaaaattgattttggcgatcttggataatcaaaatcttggaaaactcgctgagtgtgcacagtatcaagccctgctgcaaaaaaatctgatgtatttagccgcaattgctgatgcacaaccccagaccccacccatgccacctcagatgtccccacatccggctatgcaacaaggagcatattacatgcaacatcctcaggctgcagcagcagcaatggctcatcagtcgggtattttcccaccaaagatgtctccgttacaattcaataatcctcatcaaatacaggacccccagcagttacatcaagcagccctccaagggcaaatgggaatgaggcccatggggcccaataacgggatgcatccgatgcaccccgaggcaaatcttggaggatctaatgatggtcgtggaggaaacaaacaggatgctccggagacgggagcatcgggaggtgatgggcaaggcaattctggtggtgatggggctgaagatgggaaatga

SEQ ID NO: 100 - protein, 198 aa, Euphorbia esula
MQQQPQMMPMMPSYPPANITTEQIQKYLDENKKLILAILDNQNLGKLAECAQYQALLQKNLMYLAAIADAQPQTPPMPPQMSPHPAMQQGAYYMQHPQAAAAAMAHQSGIFPPKMSPLQFNNPHQIQDPQQLHQAALQGQMGMRPMGPNNGMHPMHPEANLGGSNDGRGGNKQDAPETGASGGDGQGNSGGDGAEDGK

SEQ ID NO: 101 - DNA, 642 bp, Glycine max
atgcagcagacaccgccaatgattcctatgatgccttctttcccacctacgaacataaccaccgagcagattcaaaaataccttgatgagaacaagaagctgattctggcaatattggacaatcaaaatcttggaaaacttgcagaatgtgcccagtaccaagctcagcttcaaaagaatttgatgtatttagctgcaattgctgatgcccagcctcaaaccccggccatgcctccgcagatggcaccgcaccctgccatgcaaccaggattctatatgcaacatcctcaggctgctgcagcagcaatggctcagcagcagcaaggaatgttcccccagaaaatgccattgcaatttggcaatccacatcaaatgcaggaacaacaacagcagctacaccagcaggccatccaaggtcaaatgggacttagacctggagatataaataatggcatgcatccaatgcacagtgaggctgctcttggaggtggaaacagcggtggtccaccttcggctactggtccaaacgatgcacgtggtggaagcaagcaagatgcctctgaggctggaacagctggtggagacggccaaggcagctccgcggctgctcataacagtggagatggtgaagaggcaaagtga

SEQ ID NO: 102 - protein, 213 aa, Glycine max
MQQTPPMIPMMPSFPPTNITTEQIQKYLDENKKLILAILDNQNLGKLAECAQYQAQLQKNLMYLAAIADAQPQTPAMPPQMAPHPAMQPGFYMQHPQAAAAAMAQQQQGMFPQKMPLQFGNPHQMQEQQQQLHQQAIQGQMGLRPGDINNGMHPMHSEAALGGGNSGGPPSATGPNDARGGSKQDASEAGTAGGDGQGSSAAAHNSGDGEEAK

SEQ ID NO: 103 - DNA, 633 bp, Glycine soya
atgcagcagacaccgcctatgattcctatgatgccttcgttcccacctacgaacataaccaccgagcagattcaaaaataccttgatgagaacaagaagctgattctggcaatattggacaatcaaaatcttggaaaacttgcagaatgtgcccagtaccaagctcagcttcaaaagaatttgatgtatttagctgcaattgctgatgcccagcctcaaacaccagccatgcctccacagatggcaccacaccctgccatgcaaccaggattctatatgcaacatcctcaggctgcagcagcagcaatggctcagcagcagcagcaaggaatgttcccccagaaaatgccattgcaatttggcaatccacatcaaatgcaggaacaacagcagcagctacaccagcaagccatccaaggtcaaatgggactgagacctggaggaataaataatggcatgcatccaatgcacaatgagggcggcaacagcggtggtccaccctcggctaccggtccgaacgacgcacgtggtggaagcaagcaagatgcttctgaggctggaacagctggtggagatggccaaggcagctctgcagctgctcataacagtggagatggtgaagaggcaaagtga

SEQ ID NO: 104 - protein, 210 aa, Glycine soya
MQQTPPMIPMMPSFPPTNITTEQIQKYLDENKKLILAILDNQNLGKLAECAQYQAQLQKNLMYLAAIADAQPQTPAMPPQMAPHPAMQPGFYMQHPQAAAAAMAQQQQQGMFPQKMPLQFGNPHQMQEQQQQLHQQAIQGQMGLRPGGINNGMHPMHNEGGNSGGPPSATGPNDARGGSKQDASEAGTAGGDGQGSSAAAHNSGDGEEAK

SEQ ID NO: 105 - DNA, 690 bp, Gossypium hirsutum
atgcagcagcacctgatgcagatgcagcccatgatggcagcttattatcccaacaacgtcactactgatcatattcaacagtatctcgatgagaacaagtcattgatcttaaagattgttgagagccagaattctgggaaattgagtgaatgtgctgagaaccaagcaaggctgcagcgaaacctcatgtacctggctgccattgcggattctcaaccccaaccacccaccgtgcatgcacagtttccatctggtggtatcatgcagccaggagctgggcactacatgcagcaccaacaagctcaacaaatgacacaacagtcgcttatggctgctcggtcctcaatgttgtattctcagcaaccattttctgcactgcaacaacaacagcagcaagctttgcacagtcagcttggcatgagctctggcggaagcacaggccttcatatgctgcaaactgaatctagtactgcaggtggcagtggagcacttggggccggagggtttcctgattttggacgtggttcttctggagaaggcatccatggtggcaggccaatggcaggtggaagcaagcaagatatcgggagtgccggctcagctgaaggtcgtggaggaagctctggtggtcagggtggtggtgatgggggtgaaaccctttacttaaaagcagccgatgatgggaactga

SEQ ID NO: 106 - protein, 229 aa, Gossypium hirsutum
MQQHLMQMQPMMAAYYPNNVTTDHIQQYLDENKSLILKIVESQNSGKLSECAENQARLQRNLMYLAAIADSQPQPPTVHAQFPSGGIMQPGAGHYMQHQQAQQMTQQSLMAARSSMLYSQQPFSALQQQQQQALHSQLGMSSGGSTGLHMLQTESSTAGGSGALGAGGFPDFGRGSSGEGIHGGRPMAGGSKQDIGSAGSAEGRGGSSGGQGGGDGGETLYLKAADDGN

SEQ ID NO: 107 - DNA, 642 bp, Gossypium hirsutum
atgccgcagccaccgcaaatgattcctgtgatgccttcatatccacctactaatatcactactgaacagattcagaagtaccttgatgagaataagaagttgattttggcaattttggacaatcagaatcttggaaaactcgctgaatgcgcccagtatcaagctcagctgcaaaagaatttgatgtatttagctgcaattgcggatgctcaacctcaatcaacgccagcaatgtcgcctcagatggcaccgcatccagcaatgcaacccggaggatattttatgcaacatcctcaagctgctgcaatgtcacagcaacctggcatgtaccctcaaaaggtgccattgcaattcaatagtccgcatcaaatgcaggaccctcagcacctcctatatcagcagcatcaacaagcaatgcaaggtcaaatgggaatcaggcctgggggacccaataatagcatgcatcccatgcattcagaggctagccttggaggcggcagcagtggtggtccccctcaaccttcaggcccaagtgatggacgtgctggaaacaagcaagagggctccgaagctggtggtaatgggcagggcagcacaactggtgggcatggtggcggtgatggagcggatgaggcaaagtga

SEQ ID NO: 108 - protein, 213 aa, Gossypium hirsutum
MPQPPQMIPVMPSYPPTNITTEQIQKYLDENKKLILAILDNQNLGKLAECAQYQAQLQKNLMYLAAIADAQPQSTPAMSPQMAPHPAMQPGGYFMQHPQAAAMSQQPGMYPQKVPLQFNSPHQMQDPQHLLYQQHQQAMQGQMGIRPGGPNNSMHPMHSEASLGGGSSGGPPQPSGPSDGRAGNKQEGSEAGGNGQGSTTGGHGGGDGADEAK

SEQ ID NO: 109 - DNA, 561 bp, Hordeum vulgare
atgcagcaagcgatgcccatgccgccggcggcggcggcgcctgggatgcctccttctgccggcctcagcaccgagcagatccaaaagtacctggatgaaaataaacaactaattttggctatcttggaaaatcagaacctgggaaagttggcggaatgtgctcagtatcaagctcagcttcagaagaatcttttgtatttggctgcgattgctgatactcagccacagacctctgtaagccgtcctcagatggcaccacctgctgcatccccaggggcagggcattacatgtcacaggtgccaatgttccctccgaggacccctctaacgcctcagcagatgcaggagcagcaactacagcaacaacaggctcagatgcttccgtttgctggtcaaatggttgcgagacccggggctgtcaatggcattccccaggcccctcaagttgaacaaccagcctatgcagcaggtggggccagttccgagccttctggcaccgagagccacaggagcactggcgccgataacgatggtgggagcggcttggctgaccagtcctaa

SEQ ID NO: 110 - protein, 186 aa, Hordeum vulgare
MQQAMPMPPAAAAPGMPPSAGLSTEQIQKYLDENKQLILAILENQNLGKLAECAQYQAQLQKNLLYLAAIADTQPQTSVSRPQMAPPAASPGAGHYMSQVPMFPPRTPLTPQQMQEQQLQQQQAQMLPFAGQMVARPGAVNGIPQAPQVEQPAYAAGGASSEPSGTESHRSTGADNDGGSGLADQS

SEQ ID NO: 111 - DNA, 555 bp, Lactuca serriola
  misc_feature (253)..(253): n is a, c, g, or t
atgaagcagccgatgatgccgaatccaatgatgtcttcttcgtttcctcctacaaacatcaccaccgatcagatccaaaagttccttgatgaaaacaagcaactaattatagcaataatgagcaacctaaatcttggaaagcttgctgaatgtgcccagtaccaagctctactccaaaaaaatttgatgtatctagcagccattgcagatgctcaaccacctacacctacaccaacactaaatatctcttatnagatgggcccggttccacatccagggatgccacagcaaggtggattttacatggcgcagcagcaccctcaggcggctgtaatgacggctcagccaccttctggttttccacaaccgatgcctggtatgcaatttaacagcccacaggctattcaagggcagatgggcgggaggtccggtgggccgccaagctcagccgctagtgatgtctggagaggaagcatgcaagatggtggtggtggtgctgctgctgatggtggtaaggatggtcatgctggcggtggacctgaggaagcaaagtaa

SEQ ID NO: 112 - protein, 184 aa, Lactuca serriola
  UNSURE (85)..(85): Xaa can be any naturally occurring amino acid
MKQPMMPNPMMSSSFPPTNITTDQIQKFLDENKQLIIAIMSNLNLGKLAECAQYQALLQKNLMYLAAIADAQPPTPTPTLNISYXMGPVPHPGMPQQGGFYMAQQHPQAAVMTAQPPSGFPQPMPGMQFNSPQAIQGQMGGRSGGPPSSAASDVWRGSMQDGGGGAAADGGKDGHAGGGPEEAK

SEQ ID NO: 113 - DNA, 627 bp, Lycopersicon esculentum
atgcagcagcacctgatgcagatgcagcccatgatggcagcttactatccaacgaacgtcactactgaccatattcaacagtatttggatgaaaacaaatcactcattctgaagattgttgagagccagaactctgggaaactcagtgaatgtgcggagaaccaagctaggcttcagaggaatctgatgtaccttgctgcgattgctgattcacaacctcaaccttctagcatgcattctcagttctcttctggtgggatgatgcagccagggacacacagttacttgcagcagcagcagcagcaacaacaagcgcaacaaatggcaacacaacaactcatggctgcaagatcctcgtcgatgctctatggacaacagcagcagcaatctcagttatcgcaatatcaacaaggcttgcatagtagccaactcggcatgagttctggcagtggcggaagcactggacttcatcacatgcttcaaagtgaatcatcacctcatggtggtggtttctctcatgacttcggccgcgcaaataagcaagacattgggagtagtatgtctgctgaagggcgcggcggaagttcaggtggtgagaatctttatctgaaagcttctgaggattga

SEQ ID NO: 114 - protein, 208 aa, Lycopersicon esculentum
MQQHLMQMQPMMAAYYPTNVTTDHIQQYLDENKSLILKIVESQNSGKLSECAENQARLQRNLMYLAAIADSQPQPSSMHSQFSSGGMMQPGTHSYLQQQQQQQQAQQMATQQLMAARSSSMLYGQQQQQSQLSQYQQGLHSSQLGMSSGSGGSTGLHHMLQSESSPHGGGFSHDFGRANKQDIGSSMSAEGRGGSSGGENLYLKASED

SEQ ID NO: 115 - DNA, 624 bp, Malus domestica
atgcagcagccaccacaaatgatccccgtcatgccttcatttcctcccaccaacatcaccaccgaacaaattcagaagtaccttgatgacaacaaaaagttgattctggcaatattggataatcaaaatcttggaaaacttgctgagtgtgctcagtaccaggctctgcttcaaaagaatctgatgtatttagcagcaattgccgatgcgcaaccacaggcaccagctgcccctccccagatggccccacatcctgctatgcaacaggcaggatattacatgcaacatcctcaggcagcagcaatggctcagcaacagggtattttctccccaaagatgccgatgcaattcaataacatgcatcaaatgcacgatccacagcagcaccaacaagccatgcaagggcaaatgggaatgagacctggagggcctaacggcatgccttccatgcttcatactgaggccacacatggtggtggtagtggcggcccaaattcagctggagacccaaatgatgggcgtggaggaagcaagcaagacgcctctgagtctggggcaggtggtgatggccaggggacctcagccggcgggcgtggaactggtgatggagaggacggcaagtga

SEQ ID NO: 116 - protein, 207 aa, Malus domestica
MQQPPQMIPVMPSFPPTNITTEQIQKYLDDNKKLILAILDNQNLGKLAECAQYQALLQKNLMYLAAIADAQPQAPAAPPQMAPHPAMQQAGYYMQHPQAAAMAQQQGIFSPKMPMQFNNMHQMHDPQQHQQAMQGQMGMRPGGPNGMPSMLHTEATHGGGSGGPNSAGDPNDGRGGSKQDASESGAGGDGQGTSAGGRGTGDGEDGK

SEQ ID NO: 117 - DNA, 639 bp, Medicago trunculata
atgcagcagacacctcaaatgattcctatgatgccttcattcccacaacaaacaaacataaccactgagcagattcaaaaatatcttgatgagaacaagaagctgatcctggcaatattggacaatcaaaatcttggaaaacttgcagaatgtgcccagtaccaagctcagcttcagaagaatttgatgtatttagctgcaattgctgacgcgcagccacaaacaccggccttgcctccacagatggccccgcaccctgcgatgcaacaaggattctatatgcaacatcctcaggctgcagcaatggctcagcaacaaggaatgttcccccaaaaaatgccaatgcagttcggtaatccgcatcaaatgcaggatcagcagcatcagcagcaacaacagcagctacatcagcaagctatgcaaggtcaaatgggacttagacctggagggataaataacggcatgcatccaatgcacaacgaggctgctctcggaggtagcggcagtggtggtcaaatgacgggcgtggtggtggagcaagcaagatgcttcggagctgggacagccggcggtgatggtcaaggaacctctgccgcagctgcgcacaacagtggagatgcttcagaagaaggaaagtaa

SEQ ID NO: 118 - protein, 213 aa, Medicago trunculata
MQQTPQMIPMMPSFPQQTNITTEQIQKYLDENKKLILAILDNQNLGKLAECAQYQAQLQKNLMYLAAIADAQPQTPALPPQMAPHPAMQQGFYMQHPQAAAMAQQQGMFPQKMPMQFGNPHQMQDQQHQQQQQQLHQQAMQGQMGLRPGGINNGMHPMHNEAALGGSGSGGPNDGRGGGSKQDASEAGTAGGDGQGTSAAAAHNSGDASEEGK

SEQ ID NO: 119 - DNA, 624 bp, Panicum virgatum
atgcagcagcagatgcccatgcagtcggcgcccccggcgaccggcatcaccaccgagcagatccaaaagtatttggatgaaaataagcagcttattttggccatcctggaaaatcagaacttaggaaagttggctgaatgtgctcagtatcaagctcagcttcaaaagaatctcttgtacctggctgcgattgcagatgcccaaccccaaccaccacagaaccctgcaagtcgcccacagatgatgcaacctggcatggtaccaggtgcagggcattacatgtcccaagtaccaatgttcccgccaagaacaccattaaccccgcaacagatgcaagaacagcagcagcagcagcagcagcttcaacagcagcaagcacaggctcttgctttcccgggacagatggtcatgagacctaccattaatggcatgcagcctatgcaagccgaccctgctgccgccgccgccagcctacagcagtcagcacctggccctactgatgggcgaggaggcaagcaagatgcaactgctggggtgagcacagagccttctggcaccgagagccacaagagcacaaccgcagcagatcacgatgtgggcactgatgtcgcggagaaatcctaa

SEQ ID NO: 120 - protein, 207 aa, Panicum virgatum
MQQQMPMQSAPPATGITTEQIQKYLDENKQLILAILENQNLGKLAECAQYQAQLQKNLLYLAAIADAQPQPPQNPASRPQMMQPGMVPGAGHYMSQVPMFPPRTPLTPQQMQEQQQQQQQLQQQQAQALAFPGQMVMRPTINGMQPMQADPAAAAASLQQSAPGPTDGRGGKQDATAGVSTEPSGTESHKSTTAADHDVGTDVAEKS

SEQ ID NO: 121 - DNA, 747 bp, Picea sitchensis
atgcagcagcatctcatgcaaatgcagcccatgatggcggcatacgcctccaacaacatcaccactgatcacatccagaagtacctggatgagaacaagcagttgattctggcaattctggacaaccaaaatcttggaaagctcaatgagtgtgctcagtaccaagcaaaacttcagcagaatttgatgtatctggctgcgattgctgattctcaaccacaagcacaaactgcacatgctcagattcctcctaatgcagtgatgcagtctggtgggcattacatgcagcaccagcaggcacagcaacaagtgactcctcagtctctgatggcagctagatcttccatgctgtattctcagcagccgatggctgctttgcatcaagctcagcaacaacagcagcagcagcatcagcagcaacaacaatctcttcacagccagcttggcataaattctggaggaagcagtggattgcatatgttgcatggtgagacaaacatgggatgtaatgggcctctctcatctgggggcttccctgaatttgggcgtgggtctgctacctctgctgaaggtatgcaggccaacaggggcttcactatagatcgtggttcaaataagcaggatggagtaggatcagagaatgcccatccaggtgctggtgatggaagagggagttcaactggagggcagaatgcagatgagtcagaaccatcatacctgaaagcctccgaagaagaaggaaactag

SEQ ID NO: 122 - protein, 248 aa, Picea sitchensis
MQQHLMQMQPMMAAYASNNITTDHIQKYLDENKQLILAILDNQNLGKLNECAQYQAKLQQNLMYLAAIADSQPQAQTAHAQIPPNAVMQSGGHYMQHQQAQQQVTPQSLMAARSSMLYSQQPMAALHQAQQQQQQQHQQQQQSLHSQLGINSGGSSGLHMLHGETNMGCNGPLSSGGFPEFGRGSATSAEGMQANRGFTIDRGSNKQDGVGSENAHPGAGDGRGSSTGGQNADESEPSYLKASEEEGN

SEQ ID NO: 123 - DNA, 735 bp, Pinus taeda
atgcagcagcacctcatgcaaatgcagcccatgatggcggcctacgcctccaacaatatcaccactgatcacatccagaagtacctggatgagaacaagcagttgattctggcaattttggacaaccaaaatctcggaaagctcaatgagtgtgctcaataccaagcaaaacttcagcagaatttgatgtatctggctgctattgctgattctcaacctcaagcacaaactgcacatgctcagattcctccaaatgcggtgatgcagtctggtgggcattacatgcagcatcaacaggcacagcaacaagttactcctcagtctctgatggcagctagatcttccatactgtatgctcagcaacaacagcagcagcagcatcagcagcatcagcagcaacagcagcaacaacagtctcttcacagccagcttggcataaattctggaggaagcagcggtttgcatatgttgcatggtgagacaaacatgggatgtaatgggcctctgtcatctgggggattccctgaatttgggcgtgggtctgctacctctgctgatggtatgcaggtgaacaggggctttgctatagatcgtggttcaaacaagcaggatggagttggatcagagaatgcccatgctggtgctggtgatggaagagggagttcaactggagggcagaatgcagatgagtcagaaccatcatacctgaaggcctccgaggaagaaggaaactag

SEQ ID NO: 124 - protein, 244 aa, Pinus taeda
MQQHLMQMQPMMAAYASNNITTDHIQKYLDENKQLILAILDNQNLGKLNECAQYQAKLQQNLMYLAAIADSQPQAQTAHAQIPPNAVMQSGGHYMQHQQAQQQVTPQSLMAARSSILYAQQQQQQQHQQHQQQQQQQQSLHSQLGINSGGSSGLHMLHGETNMGCNGPLSSGGFPEFGRGSATSADGMQVNRGFAIDRGSNKQDGVGSENAHAGAGDGRGSSTGGQNADESEPSYLKASEEEGN

SEQ ID NO: 125 - DNA, 663 bp, Populus tremula
atgcaacagcacctgatgcagatgcagcccatgatggcagcctattaccccagcaacgtcactactgatcatattcaacagtatctggacgaaaacaagtcattgattttgaagattgttgagagccagaattcagggaaactcagtgagtgtgcagagaaccaagcaagactgcaacaaaatctcatgtacttggctgcaattgctgattgtcagccccaaccacctaccatgcatgcccagttcccttccagcggcattatgcagccaggagcacattacatgcagcatcaacaagctcaacagatgacaccacaagcccttatggctgcacgctcttctatgctgcagtatgctcaacagccattctcagcgcttcaacaacagcaagccttacacagccagctcggcatgagctctggtggaagcgcaggacttcatatgatgcaaagcgaggctaacactgcaggaggcagtggagctcttggtgctggacgatttcctgattttggcatggatgcctccagtagaggaatcgcaagtgggagcaagcaagatattcggagtgcagggtctagtgaagggcgaggaggaagctctggaggccagggtggtgatggaggtgaaaccctttacttgaaatctgctgatgatgggaactga

SEQ ID NO: 126 - protein, 220 aa, Populus tremula
MQQHLMQMQPMMAAYYPSNVTTDHIQQYLDENKSLILKIVESQNSGKLSECAENQARLQQNLMYLAAIADCQPQPPTMHAQFPSSGIMQPGAHYMQHQQAQQMTPQALMAARSSMLQYAQQPFSALQQQQALHSQLGMSSGGSAGLHMMQSEANTAGGSGALGAGRFPDFGMDASSRGIASGSKQDIRSAGSSEGRGGSSGGQGGDGGETLYLKSADDGN

SEQ ID NO: 127 - DNA, 678 bp, Saccharum officinarum
atgcagcagcaacacctgatgcagatgaaccagaacatgattgggggctacacctctcctgccgctgtgacaaccgatctcatccagcagtacctggatgagaacaagcagctgatcctggccatcctcgacaaccagaacaatggcaaggtggaggagtgcgaacggcaccaagctaagctccagcacaacctcatgtacctggccgccatcgccgacagccagccaccacagactgcaccactatcacaatacccgtccaacctgatgatgcagccgggccctcggtacatgccaccgcagtccgggcagatgatgagcccgcagtcgctaatggcggcgcggtcctccatgatgtacgcgcacccgtccatgtcaccactccagcagcagcaggcagcgcacgggcagctgggcatggcttcagggggcggcggtggcacgaccagtgggttcaacatcctccatggcgaggccagtatgggcggtgctggtggcgcttgtgccggcaacaacatgatgaacgccggcatgttctcaggctttggccgcagcggcagtggcgccaaggagggatcgacctcgctgtcggttgacgtccgtggtggcaccagctccggcgcgcaaagcggggacggcgagtacctgaaagcaggcaccgaggaagaaggcagttaa

SEQ ID NO: 128 - protein, 225 aa, Saccharum officinarum
MQQQHLMQMNQNMIGGYTSPAAVTTDLIQQYLDENKQLILAILDNQNNGKVEECERHQAKLQHNLMYLAAIADSQPPQTAPLSQYPSNLMMQPGPRYMPPQSGQMMSPQSLMAARSSMMYAHPSMSPLQQQQAAHGQLGMASGGGGGTTSGFNILHGEASMGGAGGACAGNNMMNAGMFSGFGRSGSGAKEGSTSLSVDVRGGTSSGAQSGDGEYLKAGTEEEGS

SEQ ID NO: 129 - DNA, 561 bp, Saccharum officinarum
atgcagcagccgatgcccatgcagccgcaggcgccggagatgaccccggccgccggaatcaccacggagcagatccaaaagtatctggatgagaataagcagcttattttggctattttggaaaatcagaacctaggaaaattggcagaatgtgctcagtatcaatcacaacttcagaagaacctcttgtatctcgctgcaatcgcagatgcccaaccacagactgctgtaagccgccctcagatggcgccgcctggtgcattgcctggagtagggcagtacatgtcacaggtgcctatgttcccaccgaggacacctctaacaccccagcagatgcaggagcagcaacttcagcagcagcaggctcagctgctaaatttcagtggcctaatggttgctagacctggcatggtcaacggcatgcctcagtccattcaagttcagcaagctcagccaccaccagcagggaacaaacaggatgctggtggggtcgcctcggagccctcgggcattgagaaccacaggagcactggtggtgataatgatggtggaagcgactag

SEQ ID NO: 130 - protein, 186 aa, Saccharum officinarum
MQQPMPMQPQAPEMTPAAGITTEQIQKYLDENKQLILAILENQNLGKLAECAQYQSQLQKNLLYLAAIADAQPQTAVSRPQMAPPGALPGVGQYMSQVPMFPPRTPLTPQQMQEQQLQQQQAQLLNFSGLMVARPGMVNGMPQSIQVQQAQPPPAGNKQDAGGVASEPSGIENHRSTGGDNDGGSD

SEQ ID NO: 131 - DNA, 642 bp, Saccharum officinarum
atgcagcagcagatgcccatgccgccggcgcccgctgcggcggcggcgcccccggcggccggcatcaccaccgagcagatccaaaagtatttggacgaaaataagcaacttattttggccatcctggaaaatcagaacttaggaaagttggctgaatgtgctcagtatcaagctcaacttcaaaagaacctcttgtacctggctgcgattgctgatgcccaaccccagccaccacaaaaccctgcaggtcgccctcagatgatgcaacctggtatagtgccaggtgcggggcattacatgtcacaagtaccaatgttccctccaagaactccattaaccccacagcagatgcaagagcagcagcagcaacagcttcagcagcagcaagcgcaggctcttacattccctggacagatggtcatgagaccagctaccatcaacggcatacagcagcctatgcaagctgaccctgcccgggcagcggagctgcaacaaccaccacctatcccagctgacgggcgagtaagcaagcagcaggacacaacggctggcgtgagctcagagccttctgccaatgagagccacaagaccacaactggagcagatagtgaggcaggtggtgacgtggcggagaaatcctaa

SEQ ID NO: 132 - protein, 213 aa, Saccharum officinarum
MQQQMPMPPAPAAAAAPPAAGITTEQIQKYLDENKQLILAILENQNLGKLAECAQYQAQLQKNLLYLAAIADAQPQPPQNPAGRPQMMQPGIVPGAGHYMSQVPMFPPRTPLTPQQMQEQQQQQLQQQQAQALTFPGQMVMRPATINGIQQPMQADPARAAELQQPPPIPADGRVSKQQDTTAGVSSEPSANESHKTTTGADSEAGGDVAEKS

SEQ ID NO: 133 - DNA, 645 bp, Solanum tuberosum
atgcagcagcacctgatgcagatgcagcccatgatggcagcttactatccaacgaacgtcactactgaccatattcaacagtatttggatgagaacaaatcactcattctgaaaattgttgagagccaaaactcgggaaaactcagtgaatgtgcagagaaccaagctaggcttcagaggaatctgatgtaccttgctgctattgctgattcacaacctcagccttctagcatgcattctcagttctcttctggtgggatgatgcagccagggacacacagttacctgcagcagcagcagcagcaacaacaagcgcaacaaatggcaacacaacaactcatggctgcaagatcctcatcaatgctctatggacaacaacagcagcagcagcagcagtctcagttatcacaatttcaacaaggcttgcatagtagccaacttggcatgagttctggcagtggtggaagcactggacttcatcacatgcttcaaagtgaatcatcacctcatggtggtggtttctctcatgacttcggccgtgcaaataagcaagacattgggagtagtatgtctgctgaagggcgcggcggaagctcaggtggtgatggtggtgagaatctttatctgaaagcttctgaggattga

SEQ ID NO: 134 - protein, 214 aa, Solanum tuberosum
MQQHLMQMQPMMAAYYPTNVTTDHIQQYLDENKSLILKIVESQNSGKLSECAENQARLQRNLMYLAAIADSQPQPSSMHSQFSSGGMMQPGTHSYLQQQQQQQQAQQMATQQLMAARSSSMLYGQQQQQQQQSQLSQFQQGLHSSQLGMSSGSGGSTGLHHMLQSESSPHGGGFSHDFGRANKQDIGSSMSAEGRGGSSGGDGGENLYLKASED

SEQ ID NO: 135 - DNA, 645 bp, Sorghum bicolor
atgcagcagcagatgcccatgccgccggcgcccgctgcggcggcggcgacggcgcccccggcggccggcatcaccaccgagcagatccagaagtatttggacgaaaataagcaacttattttggccatcctagaaaatcagaacttaggaaagttggctgaatgtgctcagtatcaagctcaacttcaaaagaacctcttgtacctggctgcgattgctgatgcccaaccccgaccaccgcaaaaccctgcaggtcgccctcagatgatgcaacctggtatagtgccaggtgcagggcattacatgtcacaagtaccaatgttccctccaagaactccattaaccccacagcaaatgcaagagcagcagcagcaacagcttcagcagcagcaagcgcaggctcttgcattccctgggcagatggtcatgagaccagctaccatcaacggcatgcagcagcctatgcaggctgaccctgcccgggcagcggagctgcaacagccagcatctgtcccagccgacgggcgagtaagcaagcaggacacagcggctggggtgagctcagagccttctgccaatgagagccacaagaccacaaccggagcagatagtgaggcaggtggagacgtggcggagaaatcctaa

SEQ ID NO: 136 - protein, 214 aa, Sorghum bicolor
MQQQMPMPPAPAAAAATAPPAAGITTEQIQKYLDENKQLILAILENQNLGKLAECAQYQAQLQKNLLYLAAIADAQPRPPQNPAGRPQMMQPGIVPGAGHYMSQVPMFPPRTPLTPQQMQEQQQQQLQQQQAQALAFPGQMVMRPATINGMQQPMQADPARAAELQQPASVPADGRVSKQDTAAGVSSEPSANESHKTTTGADSEAGGDVAEKS

SEQ ID NO: 137 - DNA, 558 bp, Triticum aestivum
atgcagcaagcgatgcccatgccgccggcggcggcggcgccggggatgcctccgtctgctggcctcagcaccgagcagatccaaaagtacctggatgaaaataagcaactaattttggctatcttggaaaatcagaacctgggaaagttggcggaatgtgctcagtatcaagctcagcttcagaagaatcttttgtatttggctgcaatcgctgatactcagccacagaccactgtaagccgtcctcagatggcaccacctagtgcatccccaggggcagggcattacatgtcacaggtgccaatgttccctccgaggacccctctaacgcctcagcagatgcaggagcagcaactacagcagcaacaggctcagatgcttccgtttgctggtcaaatggttgcgagacctggggctgtcaatggcatgcctcaggcccctcaagttgaaccagcctatgcagcaggtggggccagttctgagccttctggcactgagagccacaggagcactggtgccgataatgacggggggagcggctgggctgatcagtcctaa

SEQ ID NO: 138 - protein, 185 aa, Triticum aestivum
MQQAMPMPPAAAAPGMPPSAGLSTEQIQKYLDENKQLILAILENQNLGKLAECAQYQAQLQKNLLYLAAIADTQPQTTVSRPQMAPPSASPGAGHYMSQVPMFPPRTPLTPQQMQEQQLQQQQAQMLPFAGQMVARPGAVNGMPQAPQVEPAYAAGGASSEPSGTESHRSTGADNDGGSGWADQS

SEQ ID NO: 139 - DNA, 603 bp, Triticum aestivum
atgcagcaggcgatgtccttgcccccgggagcggtcggcgcggtgtcctcgccggccggcatcaccaccgagcagatccaaaagtatttggatgaaaataagcaacttattttggccatccttgaaaatcagaacctaggaaagttggctgaatgtgctcagtatcaagctcaactccaaaagaatctcttgtatctagctgctatcgcggatgcccaaccaccacagaaccctacaagtcaccctcagatggtgcagcctggtagtatgcaaggtgcagggcattacatgtcacaagtaccaatgttccctccaagaacgcctttaaccccacagcagatgcaagagcagcagcaccagcagcttcagcagcagcaagcccaggccctttctttccccgcccaggtggtcatgagaccaggcaccgtcaacggcatgcagcagcctatgcaagcagccggcgacctccagccagcagcagcacctggagggagcaagcaggacgccgcagtggctggggccagctcggaaccatctggcaccaagagccacaagaacgcgggagcagaggaggtgggcgctgatgtagcagaacaatcctaa

SEQ ID NO: 140 - protein, 200 aa, Triticum aestivum
MQQAMSLPPGAVGAVSSPAGITTEQIQKYLDENKQLILAILENQNLGKLAECAQYQAQLQKNLLYLAAIADAQPPQNPTSHPQMVQPGSMQGAGHYMSQVPMFPPRTPLTPQQMQEQQHQQLQQQQAQALSFPAQVVMRPGTVNGMQQPMQAAGDLQPAAAPGGSKQDAAVAGASSEPSGTKSHKNAGAEEVGADVAEQS

SEQ ID NO: 141 - DNA, 672 bp, Vitis vinifera
atgcagcagcacctgatgcagatgcagcccatgatggcagcctattaccccagcaacgtcaccactgatcacattcagcagtatcttgatgaaaacaagtcattgattctgaagattgttgagagccagaattcaggaaaattgactgaatgtgcagagaaccaggcaagactacagagaaacctcatgtacctggctgcaattgctgattctcaaccccaaccacccaccatgcatgctcagttccctcctagtggcattgttcagccaggagctcactacatgcaacaccaacaagctcaacaaatgacaccacagtcgctcctggctgcacgctcctccatgctgtacacccaacaaccattttcggccctgcaacaacaacaagccatccatagccagcttggcatgggctctggtggaagtgcaggacttcacatgctgcaaagcgaggggagtaatccaggaggcaatggaacactggggactggtgggtttcctgatttcagccgtggaacttctggagaaggcctgcaggctgcaggcaggggaatggctggtgggagcaagcaagatatgggaaatgcagaagggcgaggagggaactcaggaggtcagggtggggatggaggtgagactctttacttgaaagctgctgaagatgggaattga

SEQ ID NO: 142 - protein, 223 aa, Vitis vinifera
MQQHLMQMQPMMAAYYPSNVTTDHIQQYLDENKSLILKIVESQNSGKLTECAENQARLQRNLMYLAAIADSQPQPPTMHAQFPPSGIVQPGAHYMQHQQAQQMTPQSLLAARSSMLYTQQPFSALQQQQAIHSQLGMGSGGSAGLHMLQSEGSNPGGNGTLGTGGFPDFSRGTSGEGLQAAGRGMAGGSKQDMGNAEGRGGNSGGQGGDGGETLYLKAAEDGN

SEQ ID NO: 143 - DNA, 663 bp, Zea mays
atgcagcagcagatgcccatgccgccggcgcccgctgccgccgcggcggcggcgcccccggcggcaggcatcactaccgagcagatccagaagtatttggacgaaaataagcaacttattttggccatcctggaaaatcagaacttagggaagttggctgaatgtgctcagtatcaagctcaacttcaaaagaacctcttgtacctggctgcgattgctgatgcccaaccccagcctccgcaaaaccctgcaggtcgccctcagatgatgcagcctggtatagtgccaggtgcggggcattacatgtcacaagtaccaatgttccctccaagaaccccattaaccccacagcagatgcaggagcagcagcaacaacaacagtttcagcagcagcagcagcaagtgcaggctcttacatttcctggacagatggtcatgagaccaggcaccatcaacggcatgcagcagcagcagcctatgcaggctgaccctgcccgggcagcagcggagctgcagcaggcagcacctatcccagctgacgggcgaggaagcaagcaggacaccgcgggtggggcgagctcagagccttctgccaatgagagccacaagagcgccaccggagcagataccgaggcaggtggcgacgtggccgagaaatcctaa

SEQ ID NO: 144 - protein, 220 aa, Zea mays
MQQQMPMPPAPAAAAAAAPPAAGITTEQIQKYLDENKQLILAILENQNLGKLAECAQYQAQLQKNLLYLAAIADAQPQPPQNPAGRPQMMQPGIVPGAGHYMSQVPMFPPRTPLTPQQMQEQQQQQQFQQQQQQVQALTFPGQMVMRPGTINGMQQQQPMQADPARAAAELQQAAPIPADGRGSKQDTAGGASSEPSANESHKSATGADTEAGGDVAEKS

SEQ ID NO: 145 - DNA, 2193 bp, Oryza sativa; identical to SEQ ID NO: 54

SEQ ID NO: 146 - protein, 12 aa, Artificial sequence
  Box I
  VARIANT (3)..(3): /replace = "Lys"
  VARIANT (4)..(4): /replace = "Met" /replace = "Phe" /replace = "His"
  VARIANT (6)..(6): /replace = "Glu"
  VARIANT (7)..(7): /replace = "Asp"
  VARIANT (9)..(9): /replace = "Asn"
  VARIANT (10)..(10): Xaa can be any naturally occurring amino acid
IQQYLDENKXLI

SEQ ID NO: 147 - protein, 10 aa, Artificial sequence
  Box II
  VARIANT (3)..(3): /replace= "Leu" /replace= "Val"
  VARIANT (7)..(7): /replace= "Thr"
NLMYLAAIAD

SEQ ID NO: 148 - DNA, 53 bp, Artificial sequence
  primer: prm06681
ggggacaagtttgtacaaaaaagcaggcttaaacaatgcaacagcacctgatg

SEQ ID NO: 149 - DNA, 50 bp, Artificial sequence
  primer: prm06682
ggggaccactttgtacaagaaagctgggtcatcattaagattccttgtgc

SEQ ID NO: 150 - DNA, 615 bp, Brassica napus
atgcaacagcacctgatgcagatgcagcccatgatggctggttactaccccagcaatgtcacctctgatcatattcagcagtacttggacgagaacaaatcgttgattctgaagatagttgaatctcaaaactcgggaaagctcagcgagtgtgccgagaaccaggcaaggcttcaacgcaacttaatgtacttagctgcaattgcagattctcagcctcaacctccaagcatgcatagccagtatggaactgctggtggtggtgggttgatgcagggagaaggagggtcacactatttgcaacagcaacaggcaattcaacagcagcagagtcagcagtctctaatggcggctcgatcttcaatgttgtatgctcagcagcagcaacagccttatgcaacgcttcagcagcagcaattgcaccatagccagcttgggatgagctcaagcagcggaggaggaagcagcggtctccatatgctacagggagaggctggtgggtttcatgattttggccgtgagaagttggaaatgggaagtggtgaaggcagaggaggaagctcaggggatggtggagaaaccctttacttgaagtcatcagatgatgggaactga

SEQ ID NO: 151 - protein, 204 aa, Brassica napus
MQQHLMQMQPMMAGYYPSNVTSDHIQQYLDENKSLILKIVESQNSGKLSECAENQARLQRNLMYLAAIADSQPQPPSMHSQYGTAGGGGLMQGEGGSHYLQQQQAIQQQQSQQSLMAARSSMLYAQQQQQPYATLQQQQLHHSQLGMSSSSGGGSSGLHMLQGEAGGFHDFGREKLEMGSGEGRGGSSGDGGETLYLKSSDDGN

SEQ ID NO: 152 - DNA, 639 bp, Glycine max
atgcagcagcacctgatgcagatgcagcccatgatggctgcctactaccccaacaacgtcaccactgatcacattcaacagtacctggatgagaacaagtccttgattctgaagattgttgaaagccagaattctggcaagctgagcgagtgtgccgagaaccaatcaaggctgcagagaaatctcatgtacctagctgcaatagctgattctcaaccacaaccatctccattggctggtcagtatccttctagtggacttgtgcagcagggagcacactacatgcaggctcaacaggctcagcagatgtcacaacaacagctaatggcttcgcgctcctcgctcctgtactcccaacagcctttctcagtgcttcaacagcagcaaggcatgcacagccaacttggcatgagctccagtggaagtcaaggcctccacatgctgcaaagtgaagccactaatgttggaggcaatgcaaccataggaaccggaggagggtttccggactttgtacgcattggtagtggcaagcaagatattggaatctctggtgaaggcagaggaggaaactctagtggccactctggtgatggtggtgagacacttaattacctgaaagctgctggtgatggaaactga

SEQ ID NO: 153 - protein, 212 aa, Glycine max
MQQHLMQMQPMMAAYYPNNVTTDHIQQYLDENKSLILKIVESQNSGKLSECAENQSRLQRNLMYLAAIADSQPQPSPLAGQYPSSGLVQQGAHYMQAQQAQQMSQQQLMASRSSLLYSQQPFSVLQQQQGMHSQLGMSSSGSQGLHMLQSEATNVGGNATIGTGGGFPDFVRIGSGKQDIGISGEGRGGNSSGHSGDGGETLNYLKAAGDGN

SEQ ID NO: 154 - DNA, 1248 bp, Chlamydomonas reinhardtii
atggccgccaccatgctccgctccagcacccagtcgggcattgccgctaaggccggccgcaaggaggctgtcagcgtccgcgcggtcgcccagccccagcgccaggctggtgctgccagcgtcttctcctcgtcgtcgtcgggcgctgctgctcgccgcggggtcgtcgctcaggccaccgctgttgccacccccgcggccaagcctgcggccaagaccagccagtatgagctgttcacgctcaccacctggctgctgaaggaggagatgaagggcacaatcgatggcgagcttgtgaccgtcatctcgtcggtgtcgctggcctgcaagcaaatcgcgtcgctggtgaaccgcgctggtatctccaacctgaccggtgtggctggcaaccagaacgtgcagggtgaggaccagaagaagctggacgtggtgtccaacgaggtcttcaagaactgcctggcctcctgcggccgcacgggtgtgatcgcctccgaggaggaggaccagcccgtggccgtggaggagacctactcgggcaactacatcgtggtgttcgaccccctggacggctcgtccaacatcgacgccggcatctccgtcggctccatcttcggcatctacgagcccagcgaggagtgccccattgacgccatggacgacccccagaagatgatggagcagtgcgtcatgaacgtgtgccagcccggctcgcgcctcaagtgcgccggctactgcctgtacagcagcagcaccatcatggtgctgaccatcggcaacggtgtgttcggcttcacgctggaccccctggtcggcgagttcgtgctgacccaccccaacgtgcagatccccgaggtgggcaagatctacccgttcaacgagggcaactacggcctgtgggacgacagcgttaaggcttacatggacagcctgaaggaccccaagaagtgggacggcaagccctactcggcccgctacatcggctccctggtcggtgacttccaccgcaccctgctgtacggaggcatctacggctaccccggcgacgccaagaacaagaacggcaagctccgcctgctgtacgagtgcgcgcccatgtcgttcattgccgagcaggccggcggcctcggctccaccggccaggagcgcgtgctggacgtgaaccccgagaaggtgcaccagcgcgtgccgctgttcatcggctccaagaaggaggtcgagtacctggagtccttcaccaagaagcactaa

SEQ ID NO: 155 - protein, 415 aa, Chlamydomonas reinhardtii
MAATMLRSSTQSGIAAKAGRKEAVSVRAVAQPQRQAGAASVFSSSSSGAAARRGVVAQATAVATPAAKPAAKTSQYELFTLTTWLLKEEMKGTIDGELVTVISSVSLACKQIASLVNRAGISNLTGVAGNQNVQGEDQKKLDVVSNEVFKNCLASCGRTGVIASEEEDQPVAVEETYSGNYIVVFDPLDGSSNIDAGISVGSIFGIYEPSEECPIDAMDDPQKMMEQCVMNVCQPGSRLKCAGYCLYSSSTIMVLTIGNGVFGFTLDPLVGEFVLTHPNVQIPEVGKIYPFNEGNYGLWDDSVKAYMDSLKDPKKWDGKPYSARYIGSLVGDFHRTLLYGGIYGYPGDAKNKNGKLRLLYECAPMSFIAEQAGGLGSTGQERVLDVNPEKVHQRVPLFIGSKKEVEYLESFTKKH

SEQ ID NO: 156 - DNA, 1239 bp, Bigelowiella natans
atggctgccgtgctctttcgcggaggtgtgctgtcttccaccatgactgcggctcgcacattcgcagcgccatctgtgcacacccgtggcatgcacatgtcagtcaagagcagtaaccctttctctcaggctggtcgtcgtgctgctgttagatccagtgtcgcaccctcccctgtccaagactctgctggtactatcgttgatgacggaactgtcacattaacaagattcatgattgaggaggcaatgaagagcaagactcctgggcaggaggacatggttcgtttgatttcttccatctcagttgcatgcaaacgcattgcatccatggtgcaaactgcaggaatctccggatctacaggtctggctgaaggtggtggatcagtcaacgttcaaggcgaggaacagaagaaacttgatgtcatttctaacgatgtactaaagtctgcccttcgtccttctggaaaacttggagtaattgcctctgaggaggaagataatccagttgtcgttgatgaactttactccggcgaatatgttgctactttcgatccgctcgatggatcttccaatattgatgctgcaatttccactggaactatcttcggagtgttcaaagctccagaagagtgcttgatcggggattctgataatctcagtattgcagagcagcaatgtttggaggcaacacttcaacctggaactaaccttgttgctgctggatactgcatgtattcgtcctccaccatccttgttctcaccaccggagacgggctcaatggatttactcttgacccttccattggagagttcatcctcacccatcctaatatccagattcctagccgtggaaagatctattctatgaacgaagcaaactacttcgattgggaccctaagcttcagacctacgttgataaccttaagaaggcagaaggtcaaactggagaaaagtacagctctcgctacatcggatccatggtcggagatgtgcaccgtacccttctctatggaggcatcttcgcttaccctggagataagaagaacgtcaacggaaaacttcgccttctgtacgaagctgctccaatgtcccttatcttcgaacaagcgggtggaaaatctattactggacctggtggacgtgtgttggacttagttcctgataaggttcaccagcgttgtcctgtgttcattggatcccctgatgatgtggatgaagttgaaaaggctctcgcataa

SEQ ID NO: 157 - protein, 412 aa, Bigelowiella natans
MAAVLFRGGVLSSTMTAARTFAAPSVHTRGMHMSVKSSNPFSQAGRRAAVRSSVAPSPVQDSAGTIVDDGTVTLTRFMIEEAMKSKTPGQEDMVRLISSISVACKRIASMVQTAGISGSTGLAEGGGSVNVQGEEQKKLDVISNDVLKSALRPSGKLGVIASEEEDNPVVVDELYSGEYVATFDPLDGSSNIDAAISTGTIFGVFKAPEECLIGDSDNLSIAEQQCLEATLQPGTNLVAAGYCMYSSSTILVLTTGDGLNGFTLDPSIGEFILTHPNIQIPSRGKIYSMNEANYFDWDPKLQTYVDNLKKAEGQTGEKYSSRYIGSMVGDVHRTLLYGGIFAYPGDKKNVNGKLRLLYEAAPMSLIFEQAGGKSITGPGGRVLDLVPDKVHQRCPVFIGSPDDVDEVEKALA

SEQ ID NO: 158 - DNA, 1230 bp, Aquilegia formosa x Aquilegia pubescens
atggttgcagcagctatccctacttcttgtcaactgctcttctccacctcttcttcgaccacttctcgtctatatcctccttatcttgatgccaaaactctcttctcatttcctacaaacaagagacatgtaagcattgttagaactccggcaggtgtacggtgtcaagcattaggagcagaggtagtagtgaccaagaggagtgcatttgagatacaaactctaacaggatggttattgaaacaagaacaaacaggggttatagatgcagagttaactatagttttgtctagcatttcaatggcctgtaagcagattgcttcattggtgcagagggcaagtatttccaacttaactggagttcaaggagctgttaatattcaaggtgaagatcagaagaagcttgatgtcatctctaacgaggtgttctctaattgccttagatcaagtggaagaacagggattatagcatcagaagaagaggatgtaccagttgcagtggaggaaagctactctggcaactatattgtcgtttttgatcctcttgacgggtcatcaaacattgatgccgctgtgtcaactggatccatatttggaatttatagtccgaacgatgagtgtcttactgaagtcgatgataatgccacagtgcttcagcaagtggaacagaagtgcatcatcaatgtgtgtcaacctggcaacaacttgttggcagctggctactgcatgtactcaagctctgtaatctttgtgctttccattggacaaggggttttctcatttaccttagaccctatgtacggagaattcgtcttgacacaggaaaacattcaaatacctaaatcaggtaaaatctactcattcaacgaaggcaactaccaattatgggatgataagttgaagaagtatatcgatgaccttaaggaccctggtcctagtggcaaaccatactcttccagatacattggaagcttggttggcgatttccaccggacccttctttatggagggatatatggataccctagggataagaatagaaaaaatgggaagctaaggctactgtatgagtgtgcacctatgagttatttagttgaacaagcaggaggaaaaggatcagatggacaccaaagagtactcgatattgaaccggtggagattcatcagcgtgttccacttttcattggcagcgttgaagaagttgagaaactagagaagttcttggcttga

SEQ ID NO: 159 - protein, 409 aa, Aquilegia formosa x Aquilegia pubescens
MVAAAIPTSCQLLFSTSSSTTSRLYPPYLDAKTLFSFPTNKRHVSIVRTPAGVRCQALGAEVVVTKRSAFEIQTLTGWLLKQEQTGVIDAELTIVLSSISMACKQIASLVQRASISNLTGVQGAVNIQGEDQKKLDVISNEVFSNCLRSSGRTGIIASEEEDVPVAVEESYSGNYIVVFDPLDGSSNIDAAVSTGSIFGIYSPNDECLTEVDDNATVLQQVEQKCIINVCQPGNNLLAAGYCMYSSSVIFVLSIGQGVFSFTLDPMYGEFVLTQENIQIPKSGKIYSFNEGNYQLWDDKLKKYIDDLKDPGPSGKPYSSRYIGSLVGDFHRTLLYGGIYGYPRDKNRKNGKLRLLYECAPMSYLVEQAGGKGSDGHQRVLDIEPVEIHQRVPLFIGSVEEVEKLEKFLA

SEQ ID NO: 160 - DNA, 1254 bp, Arabidopsis thaliana
atggcagcatcggccgcaacaacgacgtcgtctcaccttcttctctcaagctcacgtcacgtggcttcatcatcccagccttcaatcctttcaccgagatctctcttctccaacaacgggaaacgagcaccaactggagtgagaaaccatcagtatgcgagtggagtgaggtgtatggccgtagcggcggatgcttctgagacgaaaacggcggcgaggaagaagagtggatacgaacttcaaacgttgacgggctggttgctgagacaagagatgaaaggagagatagatgcagagctgacgatagtgatgtcgagtatatcattggcttgtaagcagatcgcttcacttgttcaacgtgccggaatatctaacctgaccggagttcaaggcgccattaatattcagggagaggatcagaagaagcttgacgtcatctctaatgaggtgttttccaactgtttgagatcaagtggaagaacgggaatcatagcctcggaggaagaggacgtgccagttgcggtggaggagagttactccggcaactacgtcgtcgtgtttgaccctcttgatggttcctccaacattgacgctgccgtctctactggttctatcttcggtatctatagccccaatgacgaatgcattgtcgacgactccgacgatatctcagctcttgggtcagaagaacaaaggtgtatagtaaacgtgtgccagccagggaacaacttgttagcagccggctactgtatgtactcgagctcggtcatcttcgttcttactctaggcaaaggcgttttctccttcacgcttgatccaatgtacggtgagtttgtcctcacgcaagaaaacattgagatccccaaagccgggagaatctactctttcaacgaagggaattaccagatgtgggacgataaactaaagaagtacattgatgaccttaaggaccctggtccaactgggaagccttactcggcaaggtacattggaagtttggttggagattttcacaggactttgttgtacggtgggatttacgggtaccctcgtgacgcaaagagcaaaaatggaaagcttaggcttttgtatgagtgtgcaccaatgagtttcattgttgaacaagctggagggaaaggttctgatggacattcgagagtactagatatccaaccgactgagatacatcagagggttcctctatacattggaagcacagaggaagtagagaagttggagaagtacttggcttga

SEQ ID NO: 161 - protein, 417 aa, Arabidopsis thaliana
MAASAATTTSSHLLLSSSRHVASSSQPSILSPRSLFSNNGKRAPTGVRNHQYASGVRCMAVAADASETKTAARKKSGYELQTLTGWLLRQEMKGEIDAELTIVMSSISLACKQIASLVQRAGISNLTGVQGAINIQGEDQKKLDVISNEVFSNCLRSSGRTGIIASEEEDVPVAVEESYSGNYVVVFDPLDGSSNIDAAVSTGSIFGIYSPNDECIVDDSDDISALGSEEQRCIVNVCQPGNNLLAAGYCMYSSSVIFVLTLGKGVFSFTLDPMYGEFVLTQENIEIPKAGRIYSFNEGNYQMWDDKLKKYIDDLKDPGPTGKPYSARYIGSLVGDFHRTLLYGGIYGYPRDAKSKNGKLRLLYECAPMSFIVEQAGGKGSDGHSRVLDIQPTEIHQRVPLYIGSTEEVEKLEKYLA

SEQ ID NO: 162 - DNA, 1254 bp, Brassica napus
atggcagcaaccgccgcgacaacgtcatcgtctcatcttcttctctcaagctctcgccacgtggcagcctcatctcagccacaaatccttttccagagatctctgttttccggcgggaaacgatcggcagctggaaaaaaccatcatgctagtggtggagtgaggtgtatggcggttgcagcggatgcttcggcggaggctaagccggcggcagcgaggaagaagagtgggtacgagcttcagacgctgacgggttggttgctgagacaagagcagaaaggagagatagatacagagctgacgatagtgatgtcgagcatagcgatggcttgtaagcagatcgcttcgcttgtacagcgcgccggaatctctaatctgaccggcgttcaaggagccgttaacattcagggagaggatcagaaaaagctcgacgtcgtctctaatgaggtattttcaaactgtttgagatcaagtggaaggacagggatcattgcgtcagaggaagaggacgtccccgtagcagttgaagagagttactccggaaactacattgtcgtctttgatcctctcgacggttcctccaacatcgacgctgcagtctccactggttcaatcttcggtatctacagccccaatgacgagtgtatcgttgacgactccgacgatatctcctctcttggttcagaagaacaaaggtgtatagtaaacgtgtgtcaaccagggaacaacttgctcgcagctggctactgtatgtactcgagctcagtcatcttcgttctcaccttaggcaagggcgttttctccttcacactcgacccaatgtacggcgagttcgtcctcactcaagagaacattgagatccccaaagcagggaaaatctactctttcaacgaagggaactaccagatgtgggacgagaaactgaagaagtacattgatgatcttaaggaccctggtccaagtgggaagccttactctgcaaggtacattggtagtttggtcggagactttcacagaactttgttgtacggtgggatttacgggtaccctcgtgacgccaagagcaaaaacggtaagcttaggcttttgtatgagtgtgcaccgatgagtttcatcgttgaacaagctggaggaaaaggatcagatggccaccaaagagtactagatatccaacccaccgagatacatcagagggttccactttacattggaagcaaagaagaagtagagaagctggagaagtacttggcttga

SEQ ID NO: 163 - protein, 417 aa, Brassica napus
MAATAATTSSSHLLLSSSRHVAASSQPQILFQRSLFSGGKRSAAGKNHHASGGVRCMAVAADASAEAKPAAARKKSGYELQTLTGWLLRQEQKGEIDTELTIVMSSIAMACKQIASLVQRAGISNLTGVQGAVNIQGEDQKKLDVVSNEVFSNCLRSSGRTGIIASEEEDVPVAVEESYSGNYIVVFDPLDGSSNIDAAVSTGSIFGIYSPNDECIVDDSDDISSLGSEEQRCIVNVCQPGNNLLAAGYCMYSSSVIFVLTLGKGVFSFTLDPMYGEFVLTQENIEIPKAGKIYSFNEGNYQMWDEKLKKYIDDLKDPGPSGKPYSARYIGSLVGDFHRTLLYGGIYGYPRDAKSKNGKLRLLYECAPMSFIVEQAGGKGSDGHQRVLDIQPTEIHQRVPLYIGSKEEVEKLEKYLA

SEQ ID NO: 164 - DNA, 1130 bp, Cyanidioschyzon merolae
atggcgaagcaagcaccgcacgctttcgttagccttggggctcctaagctgcgctcaacaaacatatggggaagggtatcggtgtcggtcttgccgctggaaacaaggcatcaacgtcgctttggtgcagtgagactgcgcgcagctttagacctacccatgacactcggacagtgggttctccaacaggagaggcagcatccagagaccgctgatttggctcctttgataacagccacagcgacagctggcaagcagattgcctcactggtcgcccgagcgggcgtgagcaacttgactggccttcagggctcggtcaacgtgcagggcgaggagcagaaaaagctggacgtgttgacgaacgaggtgctcaagaacgcgctacgctcaacagggaaactaggtgtcttggcttcggaagaggaaaacgagccagtgtcgctcatggaagaggcgtatacaggtgactttattgctgcgtttgacccgttggacggatcctcgaatttggatgcagcgatcgccacgggtacgatttttggtgtaatgcgcagcggcgagcactgtctgacgggacccgaggacgcggatataagtcagcgacaaatgcagtgcctcgtgcagacgctgcaaccgggtgcgaatctggtggcagcgggctacattctctactcctcatcggtgattttcatgctgtctattggtcacggagtgcagggtttttctctggacccagcgattggcgagtttgttttgacgcacccagatgttcgtgttccggagcgtggcaagatctactccttcaacgaggcaaactcggataactgggaccctgttcttcaagaatatattcgatcgatgaagaaaaagggctattcttcgcgctacataggatctctcgttggcgatgtccatcgcacgctgatttacggcggcgtttttggataccctggtgataagaagaacccgaacggcaagttgcgtcttctgtacgagtgcgcacctatggcgtatctcatggagcaggccggcggtatagcgaccacgggaaagcaaagaattctggatattgttccgcgagatgtccatcagcgagagccgttcatttgcggaagccccagggatgttga

SEQ ID NO: 165 - protein, 391 aa, Cyanidioschyzon merolae
MAKQAPHAFVSLGAPKLRSTNIWGRVSVSVLPLETRHQRRFGAVRLRAALDLPMTLGQWVLQQERQHPETADLAPLITATATAGKQIASLVARAGVSNLTGLQGSVNVQGEEQKKLDVLTNEVLKNALRSTGKLGVLASEEENEPVSLMEEAYTGDFIAAFDPLDGSSNLDAAIATGTIFGVMRSGEHCLTGPEDADISQRQMQCLVQTLQPGANLVAAGYILYSSSVIFMLSIGHGVQGFSLDPAIGEFVLTHPDVRVPERGKIYSFNEANSDNWDPVLQEYIRSMKKKGYSSRYIGSLVGDVHRTLIYGGVFGYPGDKKNPNGKLRLLYECAPMAYLMEQAGGIATTGKQRILDIVPRDVHQREPFICGSPRDVEDLLKIYQGSMAMRG

SEQ ID NO: 166 - DNA, 1218 bp, Glycine max
atggttgcaatggcagcagcaacagcatccacccagttgattttctcaaagccttgttccccttcacgtctatgccccttccaactatgtgtctttgacactaaacaagtgctatcaagtggcaggagaaggcatgtggggggttctggagttaggtgcatggctgtgggggaagcagcaaccactgggacaaagaagagaagtggatatgagcttcaaacactcactagctggttgctgaagcaggagcaagctggggtgattgatgcagaactcactattgtgctgtctagcatttccatggcatgcaaacagattgcttctttggtgcaaagagctaacatttccaacctcactggggttcaaggtgctgtcaatgttcaaggggaagaccagaaaaagcttgatgttgtttcaaatgaggttttctcaaactgcttgaggtcaagtgggaggacagggataatagcatcagaggaggaagatgtgccagtggcagtagaagagagttattctggaaactacattgtggtgtttgacccacttgatgggtcatccaatattgatgctgcagcgtcaactgggtccaatttttggatatacagccccaatgatgagtgtcttgctgacattgatgatgaccccacccttgacacaacagaacaaagatgtattgtgaacgtgtgccaacctggaagcaaccttcttgcagctggttactgcatgtattctagctcaataatctttgttctcacacttggaaatggagtgtttgtgtttacattggacccgatgtatggcgaattcgttttgactcaggaaaacctccagatacctagagcaggcaaaatctatgcattcaatgaaggtaattatcagttgtgggatgagaagctaaagaaatatattgatgatctcaaggacccaggtcaaagcggcaagccttattctgcaaggtacattggtagcttggtaggagatttccacaggacactgctatatggtggcatttacgggtaccccagggacaagaaaagcaagaatgggaaactaaggctcctgtatgaatgtgctcctattaacttcattgtagaacaagctggtggaaaaggtacagatggccttcaagtactccggcttcaagggacagagattcatcaacgtgtgccactgtacattggggaagaggtagagaaggtggaaaagtacttggcttaa

SEQ ID NO: 167 - protein, 405 aa, Glycine max
MVAMAAATASTQLIFSKPCSPSRLCPFQLCVFDTKQVLSSGRRRHVGGSGVRCMAVGEAATTGTKKRSGYELQTLTSWLLKQEQAGVIDAELTIVLSSISMACKQIASLVQRANISNLTGVQGAVNVQGEDQKKLDVVSNEVFSNCLRSSGRTGIIASEEEDVPVAVEESYSGNYIVVFDPLDGSSNIDAAASTGSNFWIYSPNDECLADIDDDPTLDTTEQRCIVNVCQPGSNLLAAGYCMYSSSIIFVLTLGNGVFVFTLDPMYGEFVLTQENLQIPRAGKIYAFNEGNYQLWDEKLKKYIDDLKDPGQSGKPYSARYIGSLVGDFHRTLLYGGIYGYPRDKKSKNGKLRLLYECAPINFIVEQAGGKGTDGLQVLRLQGTEIHQRVPLYIGEEVEKVEKYLA

SEQ ID NO: 168 - DNA, 1212 bp, Lycopersicon esculentum
atggcagcaacagcaacaacttcatatttaagtgctctagacaaaaagactccatttttatttgccttggacaaaaagactccatttttatgcccaaaaaacagcacaaagagaaggtcatttaatggaggagttaagtgcatggcaatagagacagcttcaggtgttacacaaaccaagaaaaagagtggctatgagttacaaactttaacaagttggctattgagacaagaacaagctggagttattgatgctgaacttaccatagtaatttcaagtatttcaatggcttgtaaacagattgcttctttggtccaaagagctggaatttctaaccttactggagttcaaggtgctgtcaatattcaaggagaagatcagaagaaacttgatgttgtctctaatgaggttttctcgaattgtctaagatcaagtggaaggactgggattatagcatcagaagaagaggatgtacctgtggcagtggaagagagttactcaggcaactacattgtggtgtttgatcctcttgatggatcatcaaacattgatgctgctgtatctaccggttctatctttggaatatacagcccgaatgatgagtgcctagctgatcttggagatgattccacgcttgacaatatagagcaaaagtgcatcgtgaatgtatgtcaaccagggacaaaccttcttgcagcaggatactgcatgtactcaagctctgtgattttcgtactcaccttgggaaatggcgttttttcctttaacttggatccaatgtatggagaatttgttctgactcaagaaaatgtccaaataccaaagtctggaaagatctattcattcaatgaaggaaactaccagctctgggatgacaagttgaaaaaatatatcgatgacttgaaagaccctggtcctagtggcaagccttactctgcaaggtacattggtagtttggtaggtgacttccatagaactcttctatatggtggcatttatggttatcctagagacagaaagagcaagaatggaaagttgaggcttttgtacgaatgtgctcccatgagcttcattgtggaacaagctggtggcaaaggatccgatggtcaccaaagagttctcgatatccaaccaactgagatacatcaacgagttccattgtacattggaagcacagaagaagttgaaaaattggagaagtacttgtcttaa

SEQ ID NO: 169 - protein, 403 aa, Lycopersicon esculentum
MAATATTSYLSALDKKTPFLFALDKKTPFLCPKNSTKRRSFNGGVKCMAIETASGVTQTKKKSGYELQTLTSWLLRQEQAGVIDAELTIVISSISMACKQIASLVQRAGISNLTGVQGAVNIQGEDQKKLDVVSNEVFSNCLRSSGRTGIIASEEEDVPVAVEESYSGNYIVVFDPLDGSSNIDAAVSTGSIFGIYSPNDECLADLGDDSTLDNIEQKCIVNVCQPGTNLLAAGYCMYSSSVIFVLTLGNGVFSFNLDPMYGEFVLTQENVQIPKSGKIYSFNEGNYQLWDDKLKKYIDDLKDPGPSGKPYSARYIGSLVGDFHRTLLYGGIYGYPRDRKSKNGKLRLLYECAPMSFIVEQAGGKGSDGHQRVLDIQPTEIHQRVPLYIGSTEEVEKLEKYLS

SEQ ID NO: 170 - DNA, 1236 bp, Medicago truncatula
atggttgcaatggcagcagcaacagcatcatcacaattaatattctcaaaaccttgttctccctcacgtctatgtcccttccaactttgtgttttcgacacgaaatcagtgttatcaagttcaagaagaaagcatgtgagtggctctggaggagtgagatgcatggctgttggtgaagtagctgctgagacaaagaaaagaagtagttatgagcttataacattgactagttggttgttgaagcaagaacaaacaggggttattgatgctgaacttactattgttttgaatagtatttcgttggcatgtaaacagattgcttctttggttcaaagagctaatatttctaaccttactggtgttcaaggtgctgtaaatattcaaggggaggatcagaaaaaacttgatgttgtctcaaatgaggtattctcaaattgtttgaggtcaagtgggaggacagggattatagcatcagaggaagaggatgtgccagtggcagtagaagagagttattcaggaaactacattgtggtctttgatccacttgatggttcatcgaatattgatgctgcagtttcaactggttctatttttgggatttacagccccaatgatgagtgtcttgctgacgtaggcaatgagtccgatgaccccacacttggcacagaagaacaacgatgcattgtgaatgtgtgccaaccaggaagcaaccttctagcagccggttactgcatgtattctagctcagtaatcttcgttctaacaatcggcaaaggagttttcgtattcacattagatccaatgtatggggaatttgttttgactcaagaaaatctccaaataccaaaatcagggaaaatttattctttcaatgaaggaaattacaagttatgggatgacaacttgaagaaatacatcgatgatctcaaggaaccgggtgctaatggcaaaccttattcagcaaggtatattggtagtttggtaggtgatttccataggacactgctatatggtggcatttatggttaccctagggacaagaaaagtaagaatggaaggcttaggcttttatatgagtgtgctccaatgagtttcattgtagaacaggctggtggaaaaggttcagatggtcatcaaagagtacttgacattcaacccaccgaaattcatcaacgtgttccactgtacattgggagcacagaggaagtggagaaggttgaaaagtacttggcttaa

SEQ ID NO: 171 - protein, 411 aa, Medicago truncatula
MVAMAAATASSQLIFSKPCSPSRLCPFQLCVFDTKSVLSSSRRKHVSGSGGVRCMAVGEVAAETKKRSSYELITLTSWLLKQEQTGVIDAELTIVLNSISLACKQIASLVQRANISNLTGVQGAVNIQGEDQKKLDVVSNEVFSNCLRSSGRTGIIASEEEDVPVAVEESYSGNYIVVFDPLDGSSNIDAAVSTGSIFGIYSPNDECLADVGNESDDPTLGTEEQRCIVNVCQPGSNLLAAGYCMYSSSVIFVLTIGKGVFVFTLDPMYGEFVLTQENLQIPKSGKIYSFNEGNYKLWDDNLKKYIDDLKEPGANGKPYSARYIGSLVGDFHRTLLYGGIYGYPRDKKSKNGRLRLLYECAPMSFIVEQAGGKGSDGHQRVLDIQPTEIHQRVPLYIGSTEEVEKVEKYLA

SEQ ID NO: 172 - DNA, 1236 bp, Nicotiana tabacum
atggcagcatcatcagcaacagcaacagcaacaacttcatttttatgtgctttagacaaaaagactccatttttatgtactctagacaaaaaaggtactccatttttatgcccaaaaggcagcagcacaacaaagagaaggtcatttaatggaggagtgaagtgcatggcaatagagacaacagcaggagctacagagaccaagaaaagaagtggctatgagttacaaactttaacaagctggctattaaggcaagaacaagctgggagtattgatgctgaacttaccatagtgatttcaagtatttctatggcttgtaagcagattgcttctttggttcagagagctggaatttctaaccttactggagttcaaggtgctgtcaatattcaaggagaagaccagaagaagcttgatgttgtctctaacgaggttttctcgaattgtctaaggtcgagtggaaggactgggattatagcatcagaggaagaggatgtaccagtggcagtggaagagagttactcaggaaactacattgtggtgtttgaccctcttgatggatcatcaaacattgatgctgctgtttctactggttctattttcggaatatacagcccaaatgatgagtgcctcgcagatcatggagatgattccacgcttgacaatgttgaacagaggtgtattgtgaatgtatgccaaccagggagcaaccttcttgcagcaggctactgcatgtactcaagctctgtgatttttgtggtcaccttgggaaacggagtctttgccttcaacttggatccgatgtatggagaattcgttctgacccaagaaaacatccaaataccaaaatctggaaagatctattcgttcaacgaaggaaactaccagctttgggatgacaaactgaagaaatacatcgatgacttgaaggaccctggtcctagcggcaagccttactctgctaggtacattggtagtttggttggtgacttccatagaactcttctatatggtggcatttatggctatcctagagataaaaagagtaagaatggaaagttgaggcttttgtatgagtgtgcccctatgagcttcctcgtggaacaagctggtggcaaaggatccgatggccaccaaagagttcttgatatccaaccaactgagatacaccagcgagtcccattgtacattggaagcacagaagaagttgaaaagttggagaagtatttatcttaa

SEQ ID NO: 173 - protein, 411 aa, Nicotiana tabacum
MAASSATATATTSFLCALDKKTPFLCTLDKKGTPFLCPKGSSTTKRRSFNGGVKCMAIETTAGATETKKRSGYELQTLTSWLLRQEQAGSIDAELTIVISSISMACKQIASLVQRAGISNLTGVQGAVNIQGEDQKKLDVVSNEVFSNCLRSSGRTGIIASEEEDVPVAVEESYSGNYIVVFDPLDGSSNIDAAVSTGSIFGIYSPNDECLADHGDDSTLDNVEQRCIVNVCQPGSNLLAAGYCMYSSSVIFVVTLGNGVFAFNLDPMYGEFVLTQENIQIPKSGKIYSFNEGNYQLWDDKLKKYIDDLKDPGPSGKPYSARYIGSLVGDFHRTLLYGGIYGYPRDKKSKNGKLRLLYECAPMSFLVEQAGGKGSDGHQRVLDIQPTEIHQRVPLYIGSTEEVEKLEKYLS

SEQ ID NO: 174 - DNA, 1221 bp, Oryza sativa
atggccgccgcagccacgacatcctcccacctgctcctgctctcccgccagcaggcggcggcctcgctccaatgcggcctctccttccggaggcagcccggcaggctcgccggtgggtcgtcggccccgagcgtgcggtgcatggcggccgtcgacacggcctcggcgcccgccgcgacggaggctagcaagaagagcagctacgagatcaccacgctgacgacgtggctgctgaagcaggagcaggccgggaccatcgacggcgagatgaccatcgtgctggccagcatctccacggcgtgcaagcagatcgcctcgctggtgcagcgcgcgcccatctccaacctcaccggcgtccagggcgccgtcaacgtgcagggcgaggaccagaaaaaactcgacgtcgtctccaacgaggtgttctccaactgcctcaaatcgagcgggcgcaccggcgtgatcgcgtcggaggaggaggacgtgccggtggccgtggaggagagctactcgggcaactacatcgtggtgttcgacccgctcgacggctcctccaacatcgacgccgccgtctccaccggctccatcttcggcatctacagccccaacgacgagtgcctagccgacatcgccgacgaccaaaatcttgaccaggtggagcagaggtgcatcgtgagcgtgtgccagccggggagcaacctgctcgccgccggctactgcatgtactcgagctcggtcatcttcgtgctcaccatcgggacaggggtgtacgtgttcacgctggacccgatgtacggcgagttcgtgctgacgcaggagaaggtgcagatccccaaggcaggcaagatctatgccttcaacgagggcaactacgcgctctgggacgacaagctcaagagctacatggacagcctcaaggagcccgggccgtccgggaagccatactccgcgcgctacatcggcagcctcgtcggcgacttccaccgcacgctgctctacggcggcatctacggctaccccagggaccagaagagcaagaacggcaagctgcggctgctgtacgagtgcgcgccgatgagcttcatcgtcgagcaggccggcggcaagggctccgatggccaccagaggatacttgacatcatgcctacggagatccatcagagagtgccgctgtacatcgggagcgtggaggaagtggagaaggtcgagaagttcttggcttga

SEQ ID NO: 175 - protein, 406 aa, Oryza sativa
MAAAATTSSHLLLLSRQQAAASLQCGLSFRRQPGRLAGGSSAPSVRCMAAVDTASAPAATEASKKSSYEITTLTTWLLKQEQAGTIDGEMTIVLASISTACKQIASLVQRAPISNLTGVQGAVNVQGEDQKKLDVVSNEVFSNCLKSSGRTGVIASEEEDVPVAVEESYSGNYIVVFDPLDGSSNIDAAVSTGSIFGIYSPNDECLADIADDQNLDQVEQRCIVSVCQPGSNLLAAGYCMYSSSVIFVLTIGTGVYVFTLDPMYGEFVLTQEKVQIPKAGKIYAFNEGNYALWDDKLKSYMDSLKEPGPSGKPYSARYIGSLVGDFHRTLLYGGIYGYPRDQKSKNGKLRLLYECAPMSFIVEQAGGKGSDGHQRILDIMPTEIHQRVPLYIGSVEEVEKVEKFLA

SEQ ID NO: 176 - DNA, 1143 bp, Ostreococcus lucimarinus
atgtctgccgccacctccgcctgcgctcgcgcgatcgtcgcgacgaagaagaccaccgcggcgcgccgcgcgggcaagtcggcgacgcgggcgacgccgcgatccgtcgcggcgcgcgcggggggcgcgggcacgccgttcacgacgtggatcttgcaacaagagatggaagaaaagatcgacggcgaactcgcggtcgtgttgtcgagcatcggcttggcgtgcaagcaaatcgcgagcttggtgcaacgcgccgggcttcaaggcatgacgggtttggcgggcgagacgaacgtgcaaggtgaagaccaaaagaagctcgacgtcatctccaacgatgtgttctgcgatgtcttgcgtcaaaccggccgcacgggcgtgattgcgtccgaggaagaagacgtgccggtcgccgtcgaagaaaccttcggcggtaactacgtcgtcgtcttcgatccgctcgatggctcttccaacatcgacgccgccgtttccacgggttccatctggggcatctacgagtccgactccacgtgcatcccggattttggcaccgaagatgcggccaagattgaagagaagtgcgtcatgaacgtgtgccaaccggggaacaacttgttgtgcgcgggctactgcatgtactcctcttccaccatcctcgtcttgaccctcggtgagggtgtgtacggtttcaccctcgacccgaccgtcggcgagttcatcatgtcccacgacaacatcaaggttccggaatctggtaagatttactccttcaacgaaggcaactacgacatgtggactccgggcttgaagaagtacatggactccctcaagactggcggcgcggaacaaggcaccaagccgtacagcgcccgttacatcggttccctcgtcggtgacttccacagaaccatcttgtacggaggcatctacggctacccgggcgactccaagaacccgaacggtaagcttcgcctcttgtacgagtgcgcgccgatgtccttcatcgccgaacaagccggcggtatgggttccaccggtaaggagcgcgtccttgacgttgtcccggaaaagtttcaccaacgtgtgccgttcttcaccggctccaagaaggaagtgcagtacttggaatccttcatgtag

SEQ ID NO: 177 - protein, 380 aa, Ostreococcus lucimarinus
MSAATSACARAIVATKKTTAARRAGKSATRATPRSVAARAGGAGTPFTTWILQQEMEEKIDGELAVVLSSIGLACKQIASLVQRAGLQGMTGLAGETNVQGEDQKKLDVISNDVFCDVLRQTGRTGVIASEEEDVPVAVEETFGGNYVVVFDPLDGSSNIDAAVSTGSIWGIYESDSTCIPDFGTEDAAKIEEKCVMNVCQPGNNLLCAGYCMYSSSTILVLTLGEGVYGFTLDPTVGEFIMSHDNIKVPESGKIYSFNEGNYDMWTPGLKKYMDSLKTGGAEQGTKPYSARYIGSLVGDFHRTILYGGIYGYPGDSKNPNGKLRLLYECAPMSFIAEQAGGMGSTGKERVLDVVPEKFHQRVPFFTGSKKEVQYLESFM

SEQ ID NO: 178 - DNA, 1134 bp, Ostreococcus tauri
atgtctgcgtgtatttctgcctctgtgacgcgcgcgcgaacggcgcgcgcgcccgcggctcgccgcgcggcgagtaaggcgcgggcgtcgccgcgcgccgtcgcggcgcgcgcggggggcgttggtacgccgtacacgacgtggattctccagcaagagatgcaagagaacattgatggtgaattggcggtggttttgtcctccatcggtctcgcgtgcaagcaaatcgcgagcctcgtccagcgcgcgggtctcgcgggcatgactggtttggcgggcgagcaaaacgtgcaaggcgaggaccagaagaagctcgacgtcatctccaacgatgttttctgcaacgtattgcgccaatccggccgcacgggcgtcatcgcctccgaagaagaagacgttccggtcgccgtcgaggaaacgtacggcggtaactacgtcgtcgtcttcgatccgcttgatggttcctccaatatcgacgccgccgtctccacgggatccatctggggtatctacgagtccgactcctcgtgtattcccgacttcggctccgatgactccgccaaggttgaagagaagtgcgtcatgaacgtttgccaaccgggcagcaacttgctctgcgcgggttactgcatgtactcctcgtccaccatcctcgtcatcaccatcggccaaggcgtgttcggttttaccctcgacccgaccgtcggtgagttcatcatgtcccacgagaacatcaaggttccggactctggcaagatttactctttcaacgaaggcaactacgccatgtggtccgacggtttgaagaagtacatggactccctcaagacgggcggcaaggacggtggcaagccgtacagcgcccgctacatcggttcgctcgtcggtgacttccaccgcacgatcctttacggaggcatctacggttacccgggtgacgcgaagaacccgaacggtaagctccgcctcctgtacgagtgcgcgccgatgtccatgatcgctgaacaagccggtggtaagggctccaccggtgtcgcgcgtgtcctggacatcgttccggaaaaggttcaccagcgcgtgccgttcttcgttggctccaagaacgaggttgcctacttggagtccttcatgtga

SEQ ID NO: 179 - protein, 377 aa, Ostreococcus tauri
MSACISASVTRARTARAPAARRAASKARASPRAVAARAGGVGTPYTTWILQQEMQENIDGELAVVLSSIGLACKQIASLVQRAGLAGMTGLAGEQNVQGEDQKKLDVISNDVFCNVLRQSGRTGVIASEEEDVPVAVEETYGGNYVVVFDPLDGSSNIDAAVSTGSIWGIYESDSSCIPDFGSDDSAKVEEKCVMNVCQPGSNLLCAGYCMYSSSTILVITIGQGVFGFTLDPTVGEFIMSHENIKVPDSGKIYSFNEGNYAMWSDGLKKYMDSLKTGGKDGGKPYSARYIGSLVGDFHRTILYGGIYGYPGDAKNPNGKLRLLYECAPMSMIAEQAGGKGSTGVARVLDIVPEKVHQRVPFFVGSKNEVAYLESFM

SEQ ID NO: 180 - DNA, 1254 bp, Phaeodactylum tricornutum
atgtttattttgaagtccccggcgctttggttgcttctttacccagttgttgcttttacggcggcgagggcgaactcgattcgtccagcggccgcgttatctgtcttcgatctgtcgagcgtggaggcagtaccgtctagaaagaccaaggccccaattttcgatgaagtttgcgacacaactggagtcactctcaaacgcttcatgaccgaggtttctctactgaatcctgaaatcgaagagctgacgacgctgtttggtgcgattgaaaccgcttgcaaagccattgcaaatcttgtcaagcgatcgccgcttccctccagtgacacgttgggtcttcagggagaaatcaacgttcaaggcgaagaccaaaagaaattagatgtgatcgccaacgatattttgaagcgagcactccgcttcacgggccgcctcggagtcttagcctcggaagaagaggatactcccgtcgatttgatgccaagggatcctagtaccaaaaaagttctaatcgatgagggagaaaagtatgtcgctgtcttcgatccgctcgatggtagctcaaacgttgatgcaggcataccgacaggcacaataattgggatatacgagcacgacgaaacttgcaagattgatcctgatgctttggaagaggatcggaccaaacaagaaaacctatgcctcgcaaatactctgcagcccggcaccaacttggtagcagcggcgtactgtttatattcttcgtcaacatttttggtgttgacgctgggagctggaacatatggattcacgctagatgagactatcggtgaatttgtcttgagccatccaaacattaagattcctgaatgctcatccattatgtcgttcaacgaggcaaatactcccagctgggatcgtccgcttcaagacactttcgcaaagtggaggacagggacaggaaagagcggcaagaaattttcaagtcgctacattggttctatggtaggggatgtccatcggacgctcctgtacggaggagtttttgggtatcctggcgacaaaaagaatcccaacgggaagctacgcctgctttatgaaggagctccaatgtcattcatcatggaacaggcgggtggattgtcgaccactggcacgcagcgtgtcatggaaatctccccagatacggtccatcaacgtgtgccgattatcatgggatccagacaagatgtcgaagaggtcatggacgcctataaaaactttggcatcgaataa

SEQ ID NO: 181 - protein, 417 aa, Phaeodactylum tricornutum
MFILKSPALWLLLYPVVAFTAARANSIRPAAALSVFDLSSVEAVPSRKTKAPIFDEVCDTTGVTLKRFMTEVSLLNPEIEELTTLFGAIETACKAIANLVKRSPLPSSDTLGLQGEINVQGEDQKKLDVIANDILKRALRFTGRLGVLASEEEDTPVDLMPRDPSTKKVLIDEGEKYVAVFDPLDGSSNVDAGIPTGTIIGIYEHDETCKIDPDALEEDRTKQENLCLANTLQPGTNLVAAAYCLYSSSTFLVLTLGAGTYGFTLDETIGEFVLSHPNIKIPECSSIMSFNEANTPSWDRPLQDTFAKWRTGTGKSGKKFSSRYIGSMVGDVHRTLLYGGVFGYPGDKKNPNGKLRLLYEGAPMSFIMEQAGGLSTTGTQRVMEISPDTVHQRVPIIMGSRQDVEEVMDAYKNFGIE

SEQ ID NO: 182 - DNA, 1233 bp, Pisum sativa
atggttgcaatggcagcagcaacagcctcatctcagttaatattctcaaaaccttactctccttcacgtctttgccccttccaactctgtgtctttgatgcaaaatcagtgttatcaagttcaaggagaaagcatgtgaatggctctggtgttagatgtatggctgtgaaggaagcaactagtgagacaaagaaaagaagtggatatgagattataacactgactagttggttgttgcagcaagaacaaaaagggattattgatgcagaacttactattgtactttctagtatttctatggcatgtaaacaaattgcttctttggttcaaagagccaatatttctaacctcactggtactcaaggtgctgtaaatattcaaggggaagaccagaaaaaacttgatgttatctcaaatgaggtattctcaaattgcttgaggtcaagtgggaggacagggataattgcgtcggaggaagaggatgtcgcggtggcagtagaagagagttattcaggaaactacattgttgtatttgatccacttgatggttcatccaatcttgatgctgcagtctcaaccggttccattttcgggatttacagccccaatgacgagtgtcttcctgattttggtgatgactctgatgacaacacacttggcacagaagaacaaaggtgcattgtgaatgtgtgtcaaccaggaagcaaccttctagcagctggctactgcatgtattctagttcagtagcttttgttcttaccataggcaaaggagtgtttgtattcacattagatccattgtacggagaattcgttttgactcaagagaatctccaaataccgaaatcaggggaaatctattctttcaatgaagggaattacaagttgtgggatgaaaacttgaagaaatatattgatgatcttaaggaaccaggtcctagtggcaagccttattcagcaaggtatattggtagtttggttggtgattttcacaggacactgttatatggtggcatttatggataccctagggacaagaaaagtaagaatgggaagcttaggcttttatatgaatgtgctccaatgagcttcattgttgaacaggctggtggaaaaggttcagatggtcatcaaagagtacttgacattcaacccacagaaattcatcaacgtgttccactttacattgggagcacagaagaggtggagaaggttgaaaagtacttagcttaa

SEQ ID NO: 183 - protein, 410 aa, Pisum sativa
MVAMAAATASSQLIFSKPYSPSRLCPFQLCVFDAKSVLSSSRRKHVNGSGVRCMAVKEATSETKKRSGYEIITLTSWLLQQEQKGIIDAELTIVLSSISMACKQIASLVQRANISNLTGTQGAVNIQGEDQKKLDVISNEVFSNCLRSSGRTGIIASEEEDVAVAVEESYSGNYIVVFDPLDGSSNLDAAVSTGSIFGIYSPNDECLPDFGDDSDDNTLGTEEQRCIVNVCQPGSNLLAAGYCMYSSSVAFVLTIGKGVFVFTLDPLYGEFVLTQENLQIPKSGEIYSFNEGNYKLWDENLKKYIDDLKEPGPSGKPYSARYIGSLVGDFHRTLLYGGIYGYPRDKKSKNGKLRLLYECAPMSFIVEQAGGKGSDGHQRVLDIQPTEIHQRVPLYIGSTEEVEKVEKYLA

SEQ ID NO: 184 - DNA, 1242 bp, Poncirus trifoliata
atggttgcagcagcagcgacaacatcatcacagcttctcttttcaagctctcactctttctctcggctctctccttaccaaatatgtgtcttcgattccaaagcactcgtgtcgtcatgtcccagcaacgttatgaagagaagacatgttggtgttgctgctggggttcggtgcatggctgttgggacaacatcggaggttgcaaccaagaagagaagttcgtatgagattgaaacgctgacaaactggctgttgaagcaagaacagtctggcgttattgatgctgagctcactattgtgctttccagcatttcaacggcgtgcaagcagattgcttctttggtgcaaagagctggcatttccaacttgactggaattcagggtgctgtcaatgttcaaggcgaggaccagaagaagctcgacgtcgtttcaaatgaggtgttctcaaactgtttgagatcaagtgggcgaactgggattatagcatcagaggaagaggatgtaccagtggcggtagaagagagctactctggaaactatattgtagtttttgatccacttgatggatcatccaacattgatgctgcagtgtctactggatccatctttggcatatacagcccaaatgatgagtgtcttgccgatattggtgatgattctactctgggcaatactgaacaaagatgtgtagtgaacgtgtgccagccaggaagcaaccttcttgctgcaggctattgcatgtattcaagctctgtaatctttgtgataactttaggcaacggagtctttgcattcaccctggatcccatgtatggagaatttgttttgacacaagagaacattcagatacccaaaaccggaaagatctatgcttttaatgaaggcaactaccagctttgggatgacaagttgaagaagtacattgacgatcttaaggatccaggacccagcggcaagccctattctgctaggtacattggcagcttggttggtgatttccatcgaactctgctctacggcggcatttatggctatccaagagacaagaagagcaagaatggaaagctgaggctcttgtatgaatgtgcaccaatgagcttcatagtggaacaagcaggaggcaaaggatctgacggccatcaaagagtacttgacattcaacctactgagattcaccagcgtattcctttaaagattggaagccaggaggaagtggagaaactggagaagtatttggcctaa

SEQ ID NO: 185 - protein, 413 aa, Poncirus trifoliata
MVAAAATTSSQLLFSSSHSFSRLSPYQICVFDSKALVSSCPSNVMKRRHVGVAAGVRCMAVGTTSEVATKKRSSYEIETLTNWLLKQEQSGVIDAELTIVLSSISTACKQIASLVQRAGISNLTGIQGAVNVQGEDQKKLDVVSNEVFSNCLRSSGRTGIIASEEEDVPVAVEESYSGNYIVVFDPLDGSSNIDAAVSTGSIFGIYSPNDECLADIGDDSTLGNTEQRCVVNVCQPGSNLLAAGYCMYSSSVIFVITLGNGVFAFTLDPMYGEFVLTQENIQIPKTGKIYAFNEGNYQLWDDKLKKYIDDLKDPGPSGKPYSARYIGSLVGDFHRTLLYGGIYGYPRDKKSKNGKLRLLYECAPMSFIVEQAGGKGSDGHQRVLDIQPTEIHQRIPLKIGSQEEVEKLEKYLA

SEQ ID NO: 186 - DNA, 1245 bp, Populus tremuloides
atggttgcacaagcagcagcaataacaacttcatcatcacatcttctcttctcaacctcacgctcactgtctcgcccatctccttcccagttatgtgtctttgactcaaaaacacttgtgtcataccccaacagcactagtacttacaagaaaaaacgtggtggtgatgggctcaagtgcatggctgtgagcacagcctcggatgctaaaacaaagaagagtacgtttgagattcaaacactgactggttggctgttgaagcaagaacaagctggtgttattgatgctgagctcactattgttatatcaagcatttcaatggcatgtaagcagattgcttctttggtgcaaagagctagcatttctaacttaactggagttcaaggttctgttaacgttcaaggagaagatcagaagaagcttgacgtggtctctaatgaggtgttctctagctgcttgagatcaagtgggaggacaggaatcatagcatcagaggaagaggacgtgccagtggcagtggaggagagttactctggaaactatatagtggtttttgacccactcgatggatcatccaacattgatgctgcagtgtctactggttccatctttggaatatacagccccaatgacgaatgcctggccgatattggagatgactccactcttgatcaaacggaacagaggtgtattgtgaatgtgtgccagccaggaaataacctccttgttgctggctactgcatgtattcaagctcagtgatttttgtgctaactattggaaaaggcgtgttctctttcagcttggatccaatgtatggagagtttgttttaactcaagaaaacatccagataccaaaggctggaaagatttattcatttaatgaaggaaactaccagttgtgggatgacaagctgaagaagtacattgatgaccttaaagaccctggtccgagtggcaagccctactccgctagatacattggaagcttggtcggtgacttccaccggacgctgctgtacggtggcatttatgggtaccccagggacaagaagagcaagaatgggaagctgaggcttctgtatgagtgtgcaccgatgagctttatagtggaacaagctggtgggaaaggatcagacgggcatcagagagtactggatatcactcctactgagatacaccagcgtgttccgctttacatagggagcgtggaggaagtggagaaattggagaagtatttggcttga

SEQ ID NO: 187 - protein, 414 aa, Populus tremuloides
MVAQAAAITTSSSHLLFSTSRSLSRPSPSQLCVFDSKTLVSYPNSTSTYKKKRGGDGLKCMAVSTASDAKTKKSTFEIQTLTGWLLKQEQAGVIDAELTIVISSISMACKQIASLVQRASISNLTGVQGSVNVQGEDQKKLDVVSNEVFSSCLRSSGRTGIIASEEEDVPVAVEESYSGNYIVVFDPLDGSSNIDAAVSTGSIFGIYSPNDECLADIGDDSTLDQTEQRCIVNVCQPGNNLLVAGYCMYSSSVIFVLTIGKGVFSFSLDPMYGEFVLTQENIQIPKAGKIYSFNEGNYQLWDDKLKKYIDDLKDPGPSGKPYSARYIGSLVGDFHRTLLYGGIYGYPRDKKSKNGKLRLLYECAPMSFIVEQAGGKGSDGHQRVLDITPTEIHQRVPLYIGSVEEVEKLEKYLA

SEQ ID NO: 188 - DNA, 1227 bp, Solanum tuberosum
atggcagcatcagcagccacagcaacagcaacaacttcatatttaagtgctctagacaaaaagactccatttttatttgccttagacaaaaagactccatttttatgcccaaaaagcagcacgaagagaaggtcatttaatggaggagtaaagtgcatggcaatagagacaacttcaggttttacagcaaccaagaaaaggagtggctatgagctgcaaactttaacaagttggctattaagacaagaacaagctggagtgattgatgctgaacttaccatagttatttcaagtatttcaatggcttgtaaacagattgcttccttagtccaaagagctggaatttctaaccttactggagttcaaggtgctgtcaatattcaaggagaagatcagaagaaacttgatgttgtctctaatgaggttttctcaaattgtctaagatcaagtggaaggactgggattatagcatcagaagaagaggatgtacctgtggcagtggaagagagttactcaggcaactacattgtggtgtttgatcctcttgatggatcatcaaacattgatgctgctgtgtctaccggttctatctttggaatatacaacccgaatgatgagtgcctcgctgatcatggagatgattccacgcttgacaatatagagcagaagtgcattgtgaatgtatgtcaaccagggacaaaccttcttgcagcaggatactgcatgtactcaagctctgtgatattcgtactcaccttgggaaatggcgttttttcctttaacttggatccgatgtacggagaatttgttctgactcaagaaaatgtccaaataccaaagtctggaaagatctattcattcaatgaaggaaactaccagctctgggatgacaagttgaagaaatatatcgatgacttgaaggaccctggccctagtggcaagccttactctgcaaggtacattggtagtttggttggtgacttccatagaactcttctatatggtggcatttatggttatcctagagaccaaaagagcaagaatggaaagttgaggcttttgtacgagtgtgctcccatgagcttcattgtggaacaagctggtggtaaaggatccgatggtcaccaaagagttctcgatatccaaccaactgaggtacatcaacgagttccattgtacattggaagcacagaagaagttgaaaaattggagaagtacttgtcttaa

SEQ ID NO: 189 - protein, 408 aa, Solanum tuberosum
MAASAATATATTSYLSALDKKTPFLFALDKKTPFLCPKSSTKRRSFNGGVKCMAIETTSGFTATKKRSGYELQTLTSWLLRQEQAGVIDAELTIVISSISMACKQIASLVQRAGISNLTGVQGAVNIQGEDQKKLDVVSNEVFSNCLRSSGRTGIIASEEEDVPVAVEESYSGNYIVVFDPLDGSSNIDAAVSTGSIFGIYNPNDECLADHGDDSTLDNIEQKCIVNVCQPGTNLLAAGYCMYSSSVIFVLTLGNGVFSFNLDPMYGEFVLTQENVQIPKSGKIYSFNEGNYQLWDDKLKKYIDDLKDPGPSGKPYSARYIGSLVGDFHRTLLYGGIYGYPRDQKSKNGKLRLLYECAPMSFIVEQAGGKGSDGHQRVLDIQPTEVHQRVPLYIGSTEEVEKLEKYLS

SEQ ID NO: 190 - DNA, 1248 bp, Spinacia oleracea
atggcatcaataggaccagcaacaacaactgcagtaaaactgcgtagctcaatcttcaatcctcagtcatctactctttccccgtctcaacaatgcattacatttacaaagtcccttcactcgtttcctactgccacccgacataatgtggcttccggggttcgttgtatggcagccgtaggagaggcggctacagaaacaaaggcaaggactagaagtaagtacgaaattgaaacactaacaggctggctgcttaaacaagaaatggcaggtgttattgatgctgaacttaccatcgttctttctagcatttcattggcttgtaaacaaattgcttccttggttcaacgagctggtatttctaacttgactggaattcaaggtgctgtcaatatccaaggagaggatcagaagaaacttgatgttgtctccaatgaggtgttttcgagctgcttgagatcgagtggaagaacaggaataatagcatcagaagaagaggatgtaccagtggcagtggaagagagttactctggaaactatattgttgtgtttgatccacttgatggttcatccaacattgatgcagctgtctccactggttccatctttggcatttatagccctaacgatgagtgcattgttgactctgatcacgacgatgagtcacagctaagtgcagaagaacagaggtgtgtagtgaatgtatgtcaaccaggggataacctattagcagcagggtattgtatgtactcaagctctgttatcttcgtacttacaattggtaaaggtgtgtatgcattcacattagatccaatgtatggtgaattcgtactcacttcagagaaaatccaaatcccaaaagctgggaagatctattcattcaatgaaggtaactacaaaatgtgggatgataaattgaagaagtacatggatgatcttaaagagccaggagagtcacagaaaccgtactcgtctcgttacatagggagtttagttggggactttcatagaacacttttatatggtgggatttatggttacccaagagatgcaaagagtaagaatgggaaattgaggcttttgtatgaatgtgcacctatgagttttattgttgaacaagctggtggtaaaggttctgatggtcatcaaagaattcttgacattcaacccaccgagatacatcaacgtgtgccactgtacatcgggagtgtggaggaagtagagaaattagagaagtacttagcataa

SEQ ID NO: 191 - protein, 415 aa, Spinacia oleracea
MASIGPATTTAVKLRSSIFNPQSSTLSPSQQCITFTKSLHSFPTATRHNVASGVRCMAAVGEAATETKARTRSKYEIETLTGWLLKQEMAGVIDAELTIVLSSISLACKQIASLVQRAGISNLTGIQGAVNIQGEDQKKLDVVSNEVFSSCLRSSGRTGIIASEEEDVPVAVEESYSGNYIVVFDPLDGSSNIDAAVSTGSIFGIYSPNDECIVDSDHDDESQLSAEEQRCVVNVCQPGDNLLAAGYCMYSSSVIFVLTIGKGVYAFTLDPMYGEFVLTSEKIQIPKAGKIYSFNEGNYKMWDDKLKKYMDDLKEPGESQKPYSSRYIGSLVGDFHRTLLYGGIYGYPRDAKSKNGKLRLLYECAPMSFIVEQAGGKGSDGHQRILDIQPTEIHQRVPLYIGSVEEVEKLEKYLA

SEQ ID NO: 192 - DNA, 1230 bp, Triticum aestivum
atggccgccgcgaccaccaccacctcccgcccgcttctgctgtcccgccagcaggcggcggctagctccctccaatgccgcctccccaggaggcccggaagcagcctctttgccggccagggccaggcgtcgactccgaatgtgcggtgcatggcagtcgtggacacggcctcggcgccggcgccggcggcggctaggaagaggagcagctacgacatgatcacgctgacgacgtggctgctgaagcaggagcaggagggggtcatcgacaacgagatgaccatcgtgctgtccagcatatccacggcgtgcaagcagatcgcctcgttggtgcagcgcgcgcccatctccaacctcaccggcgtccagggcgccaccaacgtgcagggcgaggaccagaagaagctcgacgtcatctccaacgaggtgttctcgaactgcctgaggtggagtggccgcaccggcgtgatcgcatcggaggaggaggacgtgccggtggcggtggaggagagctactcgggcaactacatcgtggtgttcgacccgctcgacggctcctccaacatcgacgccgccgtctccaccggctccatcttcggcatctacagcccatccgacgagtgccacattggcgacgacgcaacccttgacgaagtgacgcagatgtgcatagtgaacgtgtgccagccagggagcaacctgctcgccgccggctactgcatgtactcgagctcggtcatcttcgtgctcaccatcggcaccggggtgtacgtgttcacgctggacccgatgtacggcgagttcgtgctgacgcaggagaaggtgcagatcccaaagtcgggcaagatctactccttcaacgagggcaactacgcgctctgggacgacaagctcaagaagtacatggacagcctcaaggagcccggcacctccggcaagccctactccgcgcgctacatcggcagcctcgtcggcgacttccaccgcaccatgctctacggcggcatctacgggtaccccagcgaccagaagagcaagaacggcaagctgcggctgctctacgagtgcgcgcccatgagcttcatcgccgagcaggccggcggcaaaggctccgacggccaccagagggtactcgacatcatgcccacagcggtccatcagagagtgcctctgtacgtcgggagcgtggaggaagtggagaaggtggagaaattcttgtcttcagagtag

SEQ ID NO: 193 - protein, 409 aa, Triticum aestivum
MAAATTTTSRPLLLSRQQAAASSLQCRLPRRPGSSLFAGQGQASTPNVRCMAVVDTASAPAPAAARKRSSYDMITLTTWLLKQEQEGVIDNEMTIVLSSISTACKQIASLVQRAPISNLTGVQGATNVQGEDQKKLDVISNEVFSNCLRWSGRTGVIASEEEDVPVAVEESYSGNYIVVFDPLDGSSNIDAAVSTGSIFGIYSPSDECHIGDDATLDEVTQMCIVNVCQPGSNLLAAGYCMYSSSVIFVLTIGTGVYVFTLDPMYGEFVLTQEKVQIPKSGKIYSFNEGNYALWDDKLKKYMDSLKEPGTSGKPYSARYIGSLVGDFHRTMLYGGIYGYPSDQKSKNGKLRLLYECAPMSFIAEQAGGKGSDGHQRVLDIMPTAVHQRVPLYVGSVEEVEKVEKFLSSE

SEQ ID NO: 194 - DNA, 1242 bp, Zea mays
atggccgccgccgccaccacctcctcatcctcccacttgctcctcctctcccgccagcaggcggcctccctacgatgccgcctctccttcctcggccagcccgccagaaggtccggcagggtcacggcccaggcgccggccgctaaggacgtgcggtgcatggcggccgtggacactgcggcgtccgcggcggcggcggagacgagccccaagtcgagcagctacgagatcgtgacgctcacgacgtggctgctgcagcaggagcggaccggcgcgatcgacaacgagatgaccatcgtgctggccagcatatccacggcgtgcaagcagatcgccgcgctggtgcagcgcgcgcccatctccaacctcacgggcgttcagggcgccgtcaacgtgcagggcgaggaccagaagaagctcgatgtcgtctccaacgaggtgttctccaactgcctcaagtcgagcgggcgcaccggcgtgatcgcctcggaggaggaggacgtgcccgtagcggtggagcagagctactccggcaactacatcgtcgtgttcgaccctctcgacggctcctccaacatcgacgccgccgtctccactggctccatcttcggcatctacaaccccaacgacgagtgcctcgccgacgtcgacgacaacgacacccttgattcggtggagcagaggtgcatcgtgaacgtgtgccagccggggagcaacctgctggccgccggctactgcatgtactcgagctcggtgatcttcgtgctcaccgtcggcaccggggtgtacgtgttcacgctggaccccatgtacggcgagttcgtgctgacgcaggagaaggtgcagatccccaaggcgggcaagatctacgccttcaacgagggcaactacgcgctctgggacgacaagctgaagctgtacatggacagcctcaaggagcccggcgactcggggaagccctactccgcgcggtacatcggcagcctcgtcggcgacttccaccgcactctgctctacggagggatctacgggtaccccagggacaagaagagcaagaacggcaagctgcggcttctctacgagtgcgcccccatgagcttcatcgtcgagcaggccggtggcaagggctctgacggccaccagagaattcttgacatcacacctacagagatccaccaaagagtgcctctgtacattgggagcgtggaggaagtggacaaggtggagaaattcctggcttga

SEQ ID NO: 195 - protein, 413 aa, Zea mays
MAAAATTSSSSHLLLLSRQQAASLRCRLSFLGQPARRSGRVTAQAPAAKDVRCMAAVDTAASAAAAETSPKSSSYEIVTLTTWLLQQERTGAIDNEMTIVLASISTACKQIAALVQRAPISNLTGVQGAVNVQGEDQKKLDVVSNEVFSNCLKSSGRTGVIASEEEDVPVAVEQSYSGNYIVVFDPLDGSSNIDAAVSTGSIFGIYNPNDECLADVDDNDTLDSVEQRCIVNVCQPGSNLLAAGYCMYSSSVIFVLTVGTGVYVFTLDPMYGEFVLTQEKVQIPKAGKIYAFNEGNYALWDDKLKLYMDSLKEPGDSGKPYSARYIGSLVGDFHRTLLYGGIYGYPRDKKSKNGKLRLLYECAPMSFIVEQAGGKGSDGHQRILDITPTEIHQRVPLYIGSVEEVDKVEKFLA

SEQ ID NO: 196 - DNA, 1266 bp, Physicomitrella patens
atggcgaccacacaagcgattctctctgccacccttgccatagccccggcttccagctgcgagacttcgtcacggagcccggcgtccaccaaaacttgtctctcagtggcaggatcgtcgctgcatggctcagtggccggactcggagctgggaaacagattgtgagcgtgcagaggaagagcgttgccgtgagggccgccgttgcagctgagactgccgctcccaagcagcaggcgaagagccagtatgacatcactaccctgacgacgtggttgctgaagaaagagcaggcgggcgtcatcgatggcgagctcaccattgtgctctccagcatcgccctggcttgcaagcaaattgcgtctctggtgcagagggctggcatctccaacatgactgggttgcaaggagctgctaacattcaaggggaggaccagaagaagctagacgttatttcgaacgaggtgttctcaagctgtctgcgctcaagcggacggacaggcatcatcgcttctgaggaagaagacaccccggttgcagtggaggagagctactctggcaactacattgtggtgttcgaccctcttgacggctcttccaacatcgatgctgctgtttccacggggtcaatctggggaatctacaagcccaacgaggaatgcctgaccaatctcggagaggagccaactattgatgagatcgccgaaaactgcgtcgtcaatgtctgtcaaccagggagcaatttgttgtccgccgggtactgcatgtactcgagctccgtcatcctcgttctctcagtcggtgatggagtctacggcttcactctggaccctctctacggagaattcgtcctctcgcacgacaacatccaaattccaaaatctggtaagatctattccatgaatgaaggcaactacgccctctgggatgacaacctcaagaagtacgtcgacagcttgaaggaccccggtcccagcggcaagccctactccgctcgttacatcggcagtctggtgggcgacttccacaggacaatgctgtatggtggcatctatggctaccccagggattccaagagcaagaacgggaagttgaggttgctttacgagtgtgctcccatgagctacctcgctgaacaagcaggtgggaagggctccgacggtcaccagaggattctggacatccaacctgagcaggttcaccaacgtgtgccattgtacgttggaagcacggaggaggtggagaagttggagaagttcttagcttaa

SEQ ID NO: 197 - protein, 421 aa, Physicomitrella patens
MATTQAILSATLAIAPASSCETSSRSPASTKTCLSVAGSSLHGSVAGLGAGKQIVSVQRKSVAVRAAVAAETAAPKQQAKSQYDITTLTTWLLKKEQAGVIDGELTIVLSSIALACKQIASLVQRAGISNMTGLQGAANIQGEDQKKLDVISNEVFSSCLRSSGRTGIIASEEEDTPVAVEESYSGNYIVVFDPLDGSSNIDAAVSTGSIWGIYKPNEECLTNLGEEPTIDEIAENCVVNVCQPGSNLLSAGYCMYSSSVILVLSVGDGVYGFTLDPLYGEFVLSHDNIQIPKSGKIYSMNEGNYALWDDNLKKYVDSLKDPGPSGKPYSARYIGSLVGDFHRTMLYGGIYGYPRDSKSKNGKLRLLYECAPMSYLAEQAGGKGSDGHQRILDIQPEQVHQRVPLYVGSTEEVEKLEKFLA

SEQ ID NO: 198 - DNA, 1263 bp, Galderia sulphuraria
ggcacgaggaaagatgtgcaagtatactttattcaagtcctactatatctttacaaagaagagtgtcaagaaataaccactgcaaaagatatcttccttataagatggatatccatcaaaatgatagctgttcaaccccaacccaaaaagactcccgtagcagaatatttacaaacctcacaagacacaccaacttcactcactcgttacttgttggaagtagccaaacaaaataaggatatgggagatatggtggcattgataaacggtattcaatttgcttgcaaaaagatagcttcattggttggtaaagcaggggtcactgacttgatgggaatctatcaacaaggcatagtcaacgttcacggagaagaacagaaaaagttggatgttctttctaatgaagtattgaagaacgctctcaaatattcgggaaaaatggctgtcatagcttcggaagaagaagacgttcctatcatggtagaagaaagttattccggtaactatgtagtcgtgtttgatccattagatggttcttccaatttggatgctggattgcctactggaactatatttggagtgtttcaacaacaattctcgtgtctcattcatgactatgaggagtccatcgataacatggaattggcttgtttacaaaacactttacaaccaggacgtagattgattgccgctggatattgtatctattcttcttctaccatgttggtactctcattgggtaatggtcttcattgttttactttggatacggaagttggtgaatttgtattgactcgtgctaacatccaaattccacaaagaggtaatatttattctttcaacgagtccaacttttatcaatgggataaaggagttcaagattatatagagaggttaaaaaaaggaaacaatcaaacaaattgtcgttattccgcaagatatgttggctccatggttgctgatgtacatcgtacaatattgtatggcggaatatttggttatccagcagataaaaagaatgtctctggtaaattgagattggtatatgaatgtgcaccgatggcatatttggttgaacaagcaggaggtaaagcaaccacgggaatagaaaatattttagatttgacaccaaaagatattcacgaaaggaagcctcttatattaggttctccagcagatatcgaagaatttctgcaagtatatggaatgtcacgagttgatagagaagatatgcatatgtgggataacttgagtagtttataa

SEQ ID NO: 199 - protein, 420 aa, Galderia sulphuraria
GTRKDVQVYFIQVLLYLYKEECQEITTAKDIFLIRWISIKMIAVQPQPKKTPVAEYLQTSQDTPTSLTRYLLEVAKQNKDMGDMVALINGIQFACKKIASLVGKAGVTDLMGIYQQGIVNVHGEEQKKLDVLSNEVLKNALKYSGKMAVIASEEEDVPIMVEESYSGNYVVVFDPLDGSSNLDAGLPTGTIFGVFQQQFSCLIHDYEESIDNMELACLQNTLQPGRRLIAAGYCIYSSSTMLVLSLGNGLHCFTLDTEVGEFVLTRANIQIPQRGNIYSFNESNFYQWDKGVQDYIERLKKGNNQTNCRYSARYVGSMVADVHRTILYGGIFGYPADKKNVSGKLRLVYECAPMAYLVEQAGGKATTGIENILDLTPKDIHERKPLILGSPADIEEFLQVYGMSRVDREDMHMWDNLSSL

SEQ ID NO: 200 - DNA, 710 bp, Marchantia polymorpha
gaggaggataccccagtcgccgtcgaagagagctactcaggaaactacgtcgttgtcttcgatcctctcgatggatcctccaacatcgacgctgcggtatctaccggatccatctttggaatctacaggcccactgaggagtgtcttgcagacatggacgacgactcacagctcggtatggtggaacaaaactgcatcgtgaacgtatgccagcccggtagcaacctcctatccgctgggtactgcatgtactccagctccgtcattttggtgttgtcagtcggagacggtgtctatggattcacactggatcccctgtacggtgaattcgtcatgacccacgacaacatcaagatcccaaagaagggatcgatctactcgttcaatgaaggtaactacgcactctgggatgacaagctcaagaagtacatcgactcactgaaggaccccgaacccaccggcaagccttactctgctcgttacatcggtagtctggtcggtgacttccacagaaccatgctctatggtggcatctacggataccctgccgacaagaaaagcaagaacggaaagttgagacttctgtacgagtgtgctcctatgagctacttggcagagcaggccggaggaaagggttctgatggttaccgcagagttctggaaatcgagcctgagcaggtacatcagcgagtgccacttttcgtcggaag

SEQ ID NO: 201 - protein, 236 aa, Marchantia polymorpha
EEDTPVAVEESYSGNYVVVFDPLDGSSNIDAAVSTGSIFGIYRPTEECLADMDDDSQLGMVEQNCIVNVCQPGSNLLSAGYCMYSSSVILVLSVGDGVYGFTLDPLYGEFVMTHDNIKIPKKGSIYSFNEGNYALWDDKLKKYIDSLKDPEPTGKPYSARYIGSLVGDFHRTMLYGGIYGYPADKKSKNGKLRLLYECAPMSYLAEQAGGKGSDGYRRVLEIEPEQVHQRVPLFVG

SEQ ID NO: 202 - DNA, 765 bp, Tagetes patula
atcattgcatcggaggaagaagacgtgccggtggctgtggaagagagttactccggaaactacattgtcgtgtttgatccccttgatgggtcatctaatattgatgctgctgtttcaaccggttctattttcggaatctatagccccaatgatgagtgtctcgctgatattagtgacgactccacgctagacagtgtggaacaaaaatgtattgtcaacgtatgccagcccggaagcaatctactagcagccggttactgtatgtactcaagctccgtaatcttcgtgctctcgatcggtactggtgtctacgcgttcacattagacccaatgtacggtgagtttgtactcactcaagaaaagattcaaatcccgaaatcggggaagatttactcgtttaacgaaggaaactatcaactatgggacgataaattgaagaagtacatggatgatctaaaggacccgggccccacgggcaagccgtattcggctcgctacattggtagcttggttggtgattttcataggacattattgtacggagggatttacgggtacccacgtgacaaaaagagcaagaacgggaagcttcggttgttgtatgagtgtgcaccgatgagttacttggttgaacaagcgggtggaaaggggtcggatggacatcaacgagtgctcgacattcaaccaaccgagattcatcagcgcgttccgctatacattgggagcgtagaggaagtggaaaaattggagaagtatttggcttga

SEQ ID NO: 203 - protein, 254 aa, Tagetes patula
IIASEEEDVPVAVEESYSGNYIVVFDPLDGSSNIDAAVSTGSIFGIYSPNDECLADISDDSTLDSVEQKCIVNVCQPGSNLLAAGYCMYSSSVIFVLSIGTGVYAFTLDPMYGEFVLTQEKIQIPKSGKIYSFNEGNYQLWDDKLKKYMDDLKDPGPTGKPYSARYIGSLVGDFHRTLLYGGIYGYPRDKKSKNGKLRLLYECAPMSYLVEQAGGKGSDGHQRVLDIQPTEIHQRVPLYIGSVEEVEKLEKYLA

SEQ ID NO: 204 - DNA, 795 bp, Linum usitatissimum
  misc_feature (738)..(738): n is a, c, g, or t
gaggaggaacaacgtcgccgggggttctggtttcaaatgctctgccgtcgggacgcgccgtcggaggcggcaacgacgacgaagaagaggagtagctacgagattctgacgctgacgacctggcttctgcagcaggaacaggccggagtgatcgacgccgagctcacgattgtgctctccagcatctccacggcgtgtaagcagatcgcttctctagttcagcgatccgggatttctaacctcaccggcgtccagggcgccgtcaatgtccagggtgaggatcagaagaagctcgacgtcgtttcgaacgaggtgttttcaaattgcttgaggtcgagcggcaggacggggatcatagcgtcggaggaagaagacgtgccggtcgccgtggaggaaagctactccggtaactatatcgtagtgttcgatccacttgatggatcgtcaaacatcgatgccgcagtctccaccggctcaatcttcggaatctacagtcccaacgatgagtgcctggccgacatcggagacggagacgagtcaaatctagatactcaggagcagaagtgtgtggtgagcgtgtgccagccggggagcaacctactcgccgccggctactgcatgtactcaagctcggtgatcttcgtcctcacgatcggaaacggcgttttcgccttcaatctggacccaatgtacggcgagttggtgttgactcaagagaacattcagatcccgaaagcnggaaagatctactcattcaacgaaggggactaccaaatgtgggatgagaaattgaag

SEQ ID NO: 205 - protein, 265 aa, Linum usitatissimum
EEEQRRRGFWFQMLCRRDAPSEAATTTKKRSSYEILTLTTWLLQQEQAGVIDAELTIVLSSISTACKQIASLVQRSGISNLTGVQGAVNVQGEDQKKLDVVSNEVFSNCLRSSGRTGIIASEEEDVPVAVEESYSGNYIVVFDPLDGSSNIDAAVSTGSIFGIYSPNDECLADIGDGDESNLDTQEQKCVVSVCQPGSNLLAAGYCMYSSSVIFVLTIGNGVFAFNLDPMYGELVLTQENIQIPKAGKIYSFNEGDYQMWDEKLK

SEQ ID NO: 206 - DNA, 50 bp, Artificial sequence
  primer: prm08448
ggggacaagtttgtacaaaaaagcaggcttaaacaatggccgccaccatg

SEQ ID NO: 207 - DNA, 50 bp, Artificial sequence
  primer: prm08449
ggggaccactttgtacaagaaagctgggtagctgcttagtgcttcttggt

SEQ ID NO: 208 - DNA, 1167 bp, Oryza sativa
atccaagccaagaagagggagagcaccaaggacacgcgactagcagaagccgagcgaccgccttcttcgatccatatcttccggtcgagttcttggtcgatctcttccctcctccacctcctcctcacagggtatgtgcccttcggttgttcttggatttattgttctaggttgtgtagtacgggcgttgatgttaggaaaggggatctgtatctgtgatgattcctgttcttggatttgggatagaggggttcttgatgttgcatgttatcggttcggtttgattagtagtatggttttcaatcgtctggagagctctatggaaatgaaatggtttagggtacggaatcttgcgattttgtgagtaccttttgtttgaggtaaaatcagagcaccggtgattttgcttggtgtaataaaagtacggttgtttggtcctcgattctggtagtgatgcttctcgatttgacgaagctatcctttgtttattccctattgaacaaaaataatccaactttgaagacggtcccgttgatgagattgaatgattgattcttaagcctgtccaaaatttcgcagctggcttgtttagatacagtagtccccatcacgaaattcatggaaacagttataatcctcaggaacaggggattccctgttcttccgatttgctttagtcccagaattttttttcccaaatatcttaaaaagtcactttctggttcagttcaatgaattgattgctacaaataatgcttttatagcgttatcctagctgtagttcagttaataggtaatacccctatagtttagtcaggagaagaacttatccgatttctgatctccatttttaattatatgaaatgaactgtagcataagcagtattcatttggattattttttttattagctctcaccccttcattattctgagctgaaagtctggcatgaactgtcctcaattttgttttcaaattcacatcgattatctatgcattatcctcttgtatctacctgtagaagtttctttttggttattccttgactgcttgattacagaaagaaatttatgaagctgtaatcgggatagttatactgcttgttcttatgattcatttcctttgtgcagttcttggtgtagcttgccactttcaccagcaaagttc

SEQ ID NO: 209 - DNA, 1629 bp, Oryza sativa
atgatgggttgcttcactgtcctgagatccaagaagaagaagcctcttgctctcaccaagaaatcggttgatgcaagggaaagcacgtcctcaagactcccagagccagaagcgcatgtgccatcgttacaatctgctcctcctagttttaggaacaaggctaaaatccaccaatcggaaaagaaagcttcttacagcagagcgcgcgtgctgtctgctccttccagcctaattgtggttgatcaggatggtcttccatatgccgaattcgatgatcaagatgactccaggggcaagggaggttctataaagggccaccgtttctctaatccactgccccttcctctcccatcaccagaaggaaaatcattgaggaactttggcagcttcaaagccatcaatgcaagtggaccactcgatgcttcaggccctctgccacttcctccaaagaagtgtgatgggcttaagaatttctcctatgaggaactttcatcagcttgccaatggttttctggtgaccagtgtgtttccgaaagtttgacatcaacatcatacaaggcgtcctttagggatgattttaccgacccaaagaccattgaagcaatagtatctcggttgctctcctccactcagagtttgaaagagtttaaaacacaagtgaataccttggcatcacttcagcatcccaacttatgtaaactaatcggctttcacgcaagagaagaatctaatgaaaggatgttggtctatgagcgactccatcatggcagcttagataaactactctttggaagatcggatggtcgtttcatggactggtcagcacgtttgaaggttgctcttggtgctgctagaggcctggctttcctacatgatgaagggccttttcaggccatgtacaatgacttctcaacctcaaacatccaaattgacaaagatttcactgcaaagctatcaggatatggatgtgttggattcaataccgaggaggaaatatcaaatgcatctgtggctgctgcaaacctctcagtggaaaccttggagaaaggtgtactgactcccaagagcaacgtatggtgctttggagttgtcctgctggagctaataacaggaaggaagaaccttgatgtccgttcctcaaaagaagaacgcaatattgtcaagtggagtaggcctttcctcaccgatgatagtcgcctatcgttaatcatggactcccgtataaaaggacgcttccctaccaaggctgctcggattgtagcagatatcatattgagatgccttaataaagatccatcagagaggcctaccatgagggccgttgtggagtccctagcaagcgtccaggacataaaggttccatgtcgatatcctttgcaagagccatctgctgccccaagaaaggtgatgttaaaatctacaagtctcaatggcatcattcatcaccatcctgtcgtaaccttctcaccgtcacctccttcgcgaaaccaacatttgctctcgccaaggtcatccacgtctgcactgcttcctccaaggaccagctgtgctctggatgaccctagagtaagctctatcaagaaatcgccttcccctattttacggagatctggtgttgagggtttttga

SEQ ID NO: 210 - protein, 542 aa, Oryza sativa
MMGCFTVLRSKKKKPLALTKKSVDARESTSSRLPEPEAHVPSLQSAPPSFRNKAKIHQSEKKASYSRARVLSAPSSLIVVDQDGLPYAEFDDQDDSRGKGGSIKGHRFSNPLPLPLPSPEGKSLRNFGSFKAINASGPLDASGPLPLPPKKCDGLKNFSYEELSSACQWFSGDQCVSESLTSTSYKASFRDDFTDPKTIEAIVSRLLSSTQSLKEFKTQVNTLASLQHPNLCKLIGFHAREESNERMLVYERLHHGSLDKLLFGRSDGRFMDWSARLKVALGAARGLAFLHDEGPFQAMYNDFSTSNIQIDKDFTAKLSGYGCVGFNTEEEISNASVAAANLSVETLEKGVLTPKSNVWCFGVVLLELITGRKNLDVRSSKEERNIVKWSRPFLTDDSRLSLIMDSRIKGRFPTKAARIVADIILRCLNKDPSERPTMRAVVESLASVQDIKVPCRYPLQEPSAAPRKVMLKSTSLNGIIHHHPVVTFSPSPPSRNQHLLSPRSSTSALLPPRTSCALDDPRVSSIKKSPSPILRRSGVEGF

SEQ ID NO: 211 - DNA, 1674 bp, Arabidopsis thaliana
atggttttggggtgtttccctttgaaaagcaagaagaaacgtggctctgtttctatgaagcggttggatcttgaagaaagcaagccaactgctttacctgagccaccaaagattccaagtcgtaatttacaatcaggtcctccgagtttcagaaatcgtgtgaagccaattcaatcaaacaacggtggaaacggagagatgagtagccgagcaagagtcatgtttgctccgtcaagcatccacggtgcagcggaacgggatttgcttgctggtgtttaccacgacgagcaagatgaacaaccaagagatccacgtacttctactaaagaatctagccctcaaccacttccgttaccgtcaccaagaactggttcttcattgaagaattggggaagctttaagtcgtttaacggaagcagcggtcggttatcatcatccgcagctgtatctggacctttacctttgccacctagcgggtcagttaggagcttttcatatgatgaagtaatggctgcgtgtaacgctttttcttcagaccgatgtgtcatggaaggtctttcatctgttatgtacatggcttcctttggtgatgaggcttcgacctcaggtttaaagaaggttgacgcaactgttgtacgacttcacgtaactactcagagtattagggagttcattaatgaagtcaacacattggcgtcgctgcaacaccagaacctttgtaagctggtaggctatcatgctcgtgacggttctgacacaagaatgttggtgtacgagaggcttgctctgggcagcttggaccgtttactgcatgggagatcagatgggcctcctcttgattggaacactagaatgaagattgcactatgtgcagctcagggtctaaccttcttgcacgaagaaggcccttttcaggcaatgtacaatgaattttcgacggcaaatatccaagtcgataaagatttcagcgccaagctatcaggatacggttgtgcaggccatgcgcctgagacagagacatctaatagttcggcacttgctaatctctctgtcgagactctagagagagggcttttgaccccgaagagcaatgtgtggagctatggaatagttcttcttgagatgttaacgggtcggaaaaatatggacgggtcttacccgaaagaagagaggaacttagtgaaatggagcagagcttttctagcagatgattgcaggctctcgcttataatggatcctcagcttaaaggtcggtttccggcaaaagcggcgaggagcatagcagatatagcacagaaatgtctgcaggtggagccatcagagcgtccaaccatgagaaacatcgtggatcaactcaagatcatacaggacatgaagtactcgtgtaggttcccgttaagagaacccgcaccagtcgcggcaaggaaacatatgggaagatcaagcagtctcaacacgattatttggaccccggcatcagtgccaccaaggtcaagtttttcaccgtcacctccaccacgacgaccgtctgtttcacccacaaggggacggacgctcgtgtttcccccagtgtttccgccgcgagcgtgttcatctttggaggaaatggctcgggaagaggttcgaagatcgtcttcagccagtggtaggagaactagcctcgaagggttttga

SEQ ID NO: 212 - protein, 557 aa, Arabidopsis thaliana
MVLGCFPLKSKKKRGSVSMKRLDLEESKPTALPEPPKIPSRNLQSGPPSFRNRVKPIQSNNGGNGEMSSRARVMFAPSSIHGAAERDLLAGVYHDEQDEQPRDPRTSTKESSPQPLPLPSPRTGSSLKNWGSFKSFNGSSGRLSSSAAVSGPLPLPPSGSVRSFSYDEVMAACNAFSSDRCVMEGLSSVMYMASFGDEASTSGLKKVDATVVRLHVTTQSIREFINEVNTLASLQHQNLCKLVGYHARDGSDTRMLVYERLALGSLDRLLHGRSDGPPLDWNTRMKIALCAAQGLTFLHEEGPFQAMYNEFSTANIQVDKDFSAKLSGYGCAGHAPETETSNSSALANLSVETLERGLLTPKSNVWSYGIVLLEMLTGRKNMDGSYPKEERNLVKWSRAFLADDCRLSLIMDPQLKGRFPAKAARSIADIAQKCLQVEPSERPTMRNIVDQLKIIQDMKYSCRFPLREPAPVAARKHMGRSSSLNTIIWTPASVPPRSSFSPSPPPRRPSVSPTRGRTLVFPPVFPPRACSSLEEMAREEVRRSSSASGRRTSLEGF

SEQ ID NO: 213 - DNA, 2069 bp, Sorghum bicolor
ctactggattaaccccccgcgtgcgttccctccctctgtcagtctgtctctctcttggcgtcgactgggcgaccgtcgcagccgccctaagccaggtacccagaccatcttcgggcccttcgccggcgacgagcaccaccaggaattttcccagctgtagcaatgatgggttgcttcactgttctcagatccaagaagaagaaaatcccttttgataatcctcttcttccaagcaagaaatcggttgatgcaagggaaagtacgtcgtctagacttccggaaccagaagttcatgtgccatctttgcaatcagctctctcctagttttaggaacaggactaagatatcccagtcgtcaaataaagtttcaaacagcagagctcgcgtgttgtctgctccgtcaacccttattgtggttgatcagtttggctttccatatgctgaataccgagatcaagacgactccagagataaggaaggttcaacaaaggggcatcgcttttcaaatcctttgccccttcctcttccttcaccggaaggacattcttttaggaactctggtagcttcaaagctagcaacgtaagtgggccattggagatgtccagccctctcccattgcctccaaagaaatgtgatggacttagaatcttttcttacgaggaggttttgtctgcttgccaatggttttcaagtgatcagtgtgtttcagaagcacttggttcaacatcatacaaggcaacatttagggatgaatttattgatacaaagaccactgaagcaacggtagctcgattactcccctccactcagagtttgaaggagtttaaaacacaagcaactacattggcattgcttcagcatcccaatttatgtaaactgattggctattatgcaaaagaagattctaatgaaaggatgttggtctatgaacggcttcatcatgggagcttagataagctactctttggaagaccagatggtcgtttcatggactggtctaaacgtttgaaggttgcccttggtgcggccagaggtcttgctttcttgcatgatgaaggaccctttcaggccatgtacagcgagttctcaactttgaacatccaaatagataaagatttcactgctaagctttcaggatatggttgtgttggcttcaatactgaggagatatctaatgcacctgcgtctgcagcaaacctttcggtggagaccttggagaagggtttactcactcccaagagcaatgtctggagctttggagttgtgttactggagctaataactggaaggaagaaccttgatgccaattcttctaaagaagaacgcaatattgtcaggtggagtaggcctttccttactgatgatagtcgcctatctctgatcatggactcccgtataaaagggcgctttcctactaaggctgctcggatagtagcagacatcattctgaaatgcttgcataatgatccatccgagaggccgaccatgagggatgttgtggaggctctagcaagagtccaggagataaaggttccgtgcagatatcctttgcaagaaccttctgctgcaccaagaaaagtaatgctaaaatctacatccctcaatggaattgtgcctcatcatcctgtcataaccttctctccatcgccgccttcgcataaccagcacttgatttcaccaaggtcatcaacatctgccttgtttcatccaaggacatgctcttctactctggatgatcccggtgtaagctctataaagaaaacacctcctattatgcgtaggtctagcgttgaaggcttttgattgtccatattgttcttttatttctttttctcggatttatttgtttctttgttagcctagtgattttagctgtgttctgtattgtaagacaagtggccttatgtagtgcccttgagtctcgagtaataactaagcagagcaggatgaattgtaaatagtatcaggttgtagatacctttttgtgctctaattgggtggaagcagcgtgctgagtctgagtaggccttgtaacctcataaataaactcgtttcccagtttctgtcc

SEQ ID NO: 214 - DNA, 1360 bp, Saccharum officinarum
agaaacacttggttcaacatcatacaaggcaacatttagggatgaatttattgatacaaagaccactgaagcaacggtagctcgattactcccctccactcagagtttgaaggagtttaaaacacaagcgaccacattggcatcacttcagcatcccaatttgtgtaaactgattggctattatgcaaaagaagattctaatgaaaggatgttggtctatgaacggcttcatcatgggagcttagataagctactctttggaagaccagatggtcgtttcatggactggtctaaacgtttgaaggtttcccttggtgctgcccgaggtctagctttcttgcatgatgaaggaccctttcaggccatgtacagtgagttctcaactttgaacatccaaatagataaagatttcactgctaagctttcaggatatggttgtgttggcttcaatactgaggagatatctaatgcacctgcgtctgcagcaaacctttcggtggagaccttggagaagggtttactcactcccaagagcaacgtctggagctttggagttgtgttactggagctaataactggaaggaagaaccttgatgccaattcttccaaagaagaacgcaatattgtcaggtggagtaggcctttccttactgatgatagtcgcctatctctgatcatggactcccgtataaaagggcgctttccaactaaggctgctcggatagtagcagacatcattctgaaatgcttgcataaagatccatcagagaggccgaccatgagggatgttgtggaggccctagcaagagtccaggaaataaaggttccatgcagatatcctctgcaagaaccttttgctgcaccaagaaaaataatgttaaaatctacatccctcaatggaattgtgcctcatcatcctgtcataaccttctccccttcgccgccttcacataaccaacacttgatttcaccaaggtcatcaacatctgccttgtttcatccaaggacatgctcttctactctggatgatcccggtgtaagctctataaagaaaacacctcctattatgcgtaggtctagcgtcgaaggcttttgattgtccatattgttcttttatttccttttcttggatttattagtttctttggtagcctagtgattctagctatgttctgtattgcaagacaagcggccttaatgtagtgcccttgggtctagagtaataactaagcagagcaggatgaattgtaaataggatcaggttgtagatacctttttgtgctctaattgggtggaagcagcgtgctaagtgagccttgtaacctcccaatgcaataaactcgtttttcagtttttgttc

SEQ ID NO: 215 - DNA, 2062 bp, Medicago truncatula
acgaggctattctctctctttctctctctacatttctcaacattcttcaaatttctctctccaaaaccttcacttcgcagctttttcaatctgctttctttgactctgtaacagtttttttcgtggaagaatcagaaccacaaaaaagtttcgatttttacccatttcttcaacccgtgatcgcttcactgtaattggcatgagcttccatttctcgttctgacaaaaacaggtatctataacatcctagttctgtacatagaatggggtgttttactatattgaagagaaagaagaaaaagcctgatcagattgtgtatgtaaaacgcgtaagccctggcgaagattcacctacagtactgcccgaaccccaaactcatacccgctcactccagtctgcgcctcctagttttaagatcagagtgaaacccattcaacctagcaataaagccactaacaatagaatacgagcattgtctgctccatcgagtcttgatgatgcagaacaagatgcattggccaccattgagtatgaagaacaagaagggtcaaaataccgaactggatcatggaaggagcagcgttcgcctagtccacaaccattaccgcttccatctcctaagggtggtggtacattgaagactgttggaagctttaagttggggatagctagtagtcctttatatgcttctggacctttgccgcttccaccaactgggtcactgagaaacttttcttatgatgaacttgctgctgcttgcctcaatttctcttcagatcgatacatgtcagaatctctttcatccaccatgtataaagcttcctttggtgatgatacctcaacttcaagttcaaagaagtttgaagctactgtcacacgccttcgcccatcatctcagggcctgaaggaattcataaatgaggttaatactcttgcatcattgcagcatccgaacctctgtagattgctaggatttcacgcaggtgatggttcagagcatagaatgttggtttatgagaggctataccatggaagcttggaccgcttattgtatgggagatctgatgggccatcaattgattggaatacaagaatgaaaattgcaatatgtgctgcactaggtctttctttcttgcatgaagaagggccttttcaggcaatgtataatgaattttcaacagctaacattcagattgacaaagatttcagtgcaaagctttcaggatatggttgtgttggacatgttccgaaggaagagatttcaagcagttcatctgccgttggaaacctatcgatggagacactggagaaaggaatgcttactccgaaaagcaatgtatggagtttcggaattttccttctagagctacttacaggaagaaagaatctcgatagcccgtcacccaaaggaagagagaaatttggtgaagtggagcaggcctttcctgtctgataatcatcgtttgtcaatgatcatggatcctcaacttaaaggtcgctttccttctaaagcggcgagtacaatagctaacattgcacaaagatgccttcaaatggagccatcagaacgaccaaccatgggaacagttgttgagcagctgaaaaagatacaagatttgaagcattctagcagattcccgctgcaagaacctgcacaaatgtcgagatcaccaagtcttaacggtatcaaccaccctgcaccaaggccgagtttctctccatcaccatcatccagagccctggtatctgtctcacctccaagatggtcgggagtgtcaattcaacttccacctcgcgcgttttcttcaaccctctatttggaggagcttgataggcaagaaagccgcaagtcagcttcagcctctaggaaggctagtgttgaaggattttgattgtcgatagtgttcattttttatttgttattctttttttggtgtagttcaacagagatttataggagataaagatttgtaatcatccctcagtgtgatgcagagaggatgctcttttgtacatagtgcaaaggttggtccccttggttcaattagttactccattttg

SEQ ID NO: 216 - DNA, 2039 bp, Zea mays
ctcccccggcgtgcgctccctcctgtctctcttggcgacgactgggcaacggtcgcagctgtatgttcgagcccttcgccgacgacgttcaccaccaggaattttctcagctgtgccaatgatgggttgcttcactgttctcagatccaagaagaagaaaagccattttgataatcctcttgtcccaagcaagaaatcagttgatgcaagggaaagtacgtcctctagacttccggagccagaagttcatgtgccatctttgcaatcagctcctcctagttttaggaacagggtcaagatatccgagtcatcaaatgaagtttcaaacagaaacagcagggctcgcgtgctgtctgctccatcagcccttattgtggttgatcagtttggctttccatattcggaataccgagatcaagatgactccagggataaggaaggtttgacaaaggggcatcgcttttcaaatcctttgccccttcctcttccttcacgcgaaggacattcttttaggaactctggtagcttcaaagccagcaacgtaagcgggccattggagatgtctggccctctcccattgcctctaaagaaatgtgatggacttagaatcttctcttatgaggagatttcatctgcctgccaacgattttctagtgatcagtgtgtttcagaaacacttggttcaacatcatacaaggcaacatttagagatgaatttattgatacgaggaccactgaagcaacagtagctcgattactcccctccactcagagtttgaaggagtttaaaacgcaagcgaccacattggcatcgcttcagcatcccaatttatgtaaactgattggctattatgcaaaagaagattctaatgaaaggatgttggtctatgaacggctttatcatggaagcttagataagctactctttggaagatcagatggtcgtttcatggactggtctaaacgtttgaaggttgccctgggtgctgccagaggtctagctttcttgcatgatgaaggaccctttcaggccatgtacagcgagttctcaactttgaacatccaaatagataaaggtttcactgctaagctttcaggatatggttgtgttggcttcaataccgaggagatatctaatgcacctgtgtctgcagcaaacctttcggtggagaccttggagaagggtttactcactcccaagagcaacgtctggagctttggagtcgtgttactggagctaataactggaaggaagaaccttgatcccaattattccaaagaagaacgcaatattgtcaactggagtaggcctttccttactgatgacagtcgcttgtctcttatcatggactcccgtataaaagggcgctttcccactaaggctgctcggatagtagcagacatcattttgaaatgcctgcgtaaggatccatcggagaggcctaccatgagggatgttgtggaggccctagcaagagtccaggaaataaaggttccgtgcagatatcctctgcaagaaccttctgctgcaccaagaaaagtgatgttgaaatctacatccctcaatgggattgtgcctcaccatcctgtcataaccttctctccatcgccgccttcacataaccagcacttgatttcaccaaggtcgtcgacatctgccttgtttcatccaagggcatgctcttctaccctggacgatccgagtgtaagttctataaagaaaacaccacctattatgcgaaggtctagcgtcgaaggcttttgattgtccatattgttcctttatttccttttcttggatttatttgtttctttgttagtagtgtagcggtttttagctgtgttctgtattgtaagacaagtggcctcatatgtagtgcccttgggtctggagtaaagcagaacaggatgaattgtaaataggaccaggttgtagataccttttttttgtgctcgaattgggtggaagcagcgtgccgagtgggccttgtaacctcataatgcaataaactccgtttcccagtttctgtaaaaaaaaa

SEQ ID NO: 217 - DNA, 1479 bp, Hordeum vulgare
tgccgaattcggcacgagaaagaggtccgaggggcttaagaacttctcgtacgatgagatttccactgcttgccagtggttttctggcgatcatcgtgtctcagaaactctgacttcgacatcatacaaggcattgttcagggatgatttcgttgaaccaaagaagatggaagcaatagtagccaggttactcccttccaatcagagtttcaaagaatttaaggcacaagtaaatacgttggcatcacttcaacatcccaatttatgtaaactcatcggctatcacgcaagagaagaatctaatgaaaggatgttggtctatgagcggctccatcatggcagtttagacaggttactctttggaagaccggaaggtcgtttcatggactggtctacacgtttgaaggttgcccttggtgctgctaaaggtctagctttcctacacgatgaaggaccctttcaggcaatgtatgatgacttctcaacgtcaaacatccaaatagagaaagatttcactgcaaagctgtcgggatatggttgtgttggcttcaattctgacgaggaaagatccaaggcatctgtggctgcaaacctctcagaggaaaccttggagaaaggcgtactgactccgaagagcaacgtatggagctttggagttgtcttgctcgagctaataacaggacggaagaacctcgatgtacgttccaccaaagaagaacgtaatattgtcaagtggggtaggcctttcctcaccgacgatagtcgtctatccctcatcatggatccccgtataaaaggacgctttcctaccaaggctgctcgaactgtggcagacataattctgaagtgccttcaaagagatccatcagaaaggcctacgatgagggccgtcgtggaggccctaacaagcgttcaggacataaaggtcccctgccggtatcctcttcaagtaccgtcccgccgcacccgaggaaagtgatgctaaagtctacgagcctcaatggcattgttcctcagcatcccgtcatgaccttctcgccgtcgcctccttcgcgcaaccagcacctggcgtcgccaagatcatcgacttccgcgcttcttcccccaaggacctgctcttccatcatcaccctggattaccccagggtaagctcggtcaagaagtcgccttccggtatcctgcggagacctggcgtcgagggtttttgattgtccatacatggtcggatttcttctctttgccttggatttatttgttgttttggttagcctagcgagtggtctcagtgctatgtgatatgtatatgttggaaagacatctgaaaaaagggcagagtgaagtgtagatagtagaaccagctttgtagatacttgtcgttctctgattggatgggggtcatggaagcagtgtgtgttagagtggggcttgtaaccccattattatgcaataaacgtgggttggtcggtcgtatttgctcg

SEQ ID NO: 218 - DNA, 769 bp, Glycine max
gtaaattgctaggatttcatgcacgagagggttcagaacatagaatgttggtttatgaaaggctataccatggaagcttggatcgcttattgtatgggagatctgatgggccatcaattgattggaatacaagaatgaaaattgctatatgtgctgcacaaggtctaaccttcttgcacgaagaggggccttttcaggctatgtataatgagttctcaacagccaacatacagattgacaaagatttcagcgcaaagctttcaggatatggttgtgttggacatattcccgaagaagagatttcaagcagctcatctgctgttggaaacctatcaatggaaacactggagaaaggaatgctcactccaaagagcaacgtatggagttttggaatttttcttctggagctacttactggaagaaagaatcttgatagccgtcaccccaaggaagagaggaatttagtcaagtggagccggcctttcttagccgataactaccgtctgtcgttgatcatggatcctcaactcaaaggccgctttccttctaaagcagcaagaacaatagctgatattgcacaaagatgccttcaaaaggagccatcagacagacctaccatgaggactgttgttgagcatctcaagataatacaggatttgaaatattcgtgccggttccctctgcaagaaccagcatcaaactctggaaaacatatgtcaagatcaccaagtctcaatggcatcatctgccctgcaccaagggtgagttt

SEQ ID NO: 219 - DNA, 1150 bp, Solanum tuberosum
ttcttagctcatcgaaacgttaaaccttacaatacttcaaacatcgatcaatacaatttgctgaagcacgcaatttttcaaggactgtataaacaacaaagatgggttgtttcacagttttaaaaagtaagaagaagaagtctgaacagagtattcacatcaaacgtgtgaatcctcaggaacattctcctactgcattgcccgagcctcaagtgcagacacggtcgttgcagtcggcacctccaagttttagaactagagtaaaacctgtacagtcgagtaatagagttacaagcagtagggcgcgggcactctctgccccatctagcctggactcagcagaacaagatgtagcatcaaatgaatgtgaggaacatgatgagttcaagagtcgtattggttcaatcaaggagtaccaatcaccaagtcctcagcctcttcctcttccatctccacagagtgccgctgccactctcaagactatgggaagctttaaagttggcaacgccagcggtccgttaaatgcctctggacccctgccactgcctcctacactgccttcaacattgccttctactggagcactcaggaacttctcatttgaagaacttgctgctgcctgccaccgcttctctcctgaacggtgtatgtcagaaggtctctcttctgttatttacagagcttcttttggagatgatgcaactggtacaaagaagcttgaagccactgtaacccggcttcatccttcttcgcaggggttgaaggaatttgtgactgaggtgaacacactagcttctttgcaacatccatcactttgtaaactgattggtttccatgccacggggaaggttccgagcacagaatgttggtttatgaaaggctttttcatggaagcttagaccggcttttgtttgggaggtccgatggtcccccgatagactggaatgctcgaacgaaaattgctttatgtgctgctcaaggtctcacattcctgcatgaggaaggaccttttcaggcaatgttccatgaattttccactgcaaatatacaaattgataaggattgcagtgcaaagctctcgggatatggatgcattactcctataccagagacagacatatcatgcagttcagctgccctggcaatctct

SEQ ID NO: 220 - DNA, 910 bp, Lycopersicon esculentum
catggaagcttacaccggcttttatttgggaggtcggatggtcccccaatagactggaatgctcgaataaaaattgctttatgtgctgctcaaggtctcacattcctgcatgaggaaggaccttttcaggcaatgttccatgaattttccactgcaaatatacaaattgataaggattgcagtgcaaagctctcgggatatggatgcattactcatatacaagagacagacatatcatgcagttcagctgccctggcaaatctctctgaggagactctggagcgaggattggtaactccaaagagtaatgtttggagttttgggattgttcttcttgagctgctgactggccggaagaatttaagcagtcggcatccaaaggaagagaggaatttagtgaagtggagcaagctttttctagctgatgacagtagattatcgctaatcatggaccctcagttaaaaggtcggttccctgccaaagcagcaagaactgtggctgatattgctcaaagatgtctgcaaaaggatccatctgaaaggcccaccatgagaactgtagtggagcaactcaagactgtacaagttatgaagtacccttctcggtttcctcttcaagagccaagggcagttggtgtaaaacacatgtcaaagtgtccgagcctaaatggaattattaccccaacatcaagattgagcttctccccttcaccaccaacccaccctatatctatttctccgacaaggacagctgctccactgctgtctctaccttcatgttcctccatcctctctatggaggactttgatcgattggaaaatcgaaggccatcatcttcatctgttcggaggtctagtgtcgaaggattttgatcgattgtagagcacttttttcttcaaattgcttttc

SEQ ID NO: 221 - DNA, 681 bp, Lycopersicon esculentum
gagaggctttttcatggaagcttagacagacttttgttcggaagatcagatggcccctctatagattggaatgcgagaaccaaaattgccctatgtgctgcacaaggtcttacatttctacatgaggagggaccttttcaggcaatgttccaagaattttcaactggaaatatacaaatcgacaaggattttagtgcaaagctctcggggtatggatgcattacgaatatacaagagacggagatatcttgcaattcaatcgccctggcgaatctctcacaggagacactggagagagggttgataactcctaagagcaatgtttggagtttcgggattgttcttttagaactgctcactggccggaagaatcttgatggtcggtattcaaaggaagagaggaatctagtcaagtggagtaggcctttccttgctgatgatggtagattatcgcttatcatggatcctcagcttaaaggacggtttcccgcaaaagcagcccgtacagtggctgatattgcccaaagatgcctgcaaaaggatccatctgaaaggcccaccatgagaactatcttggaccaactcaaatccgtacaagtgatgaagtgcccttcacggtttcctctgcaagaaccagcggttgttggtggtaaacacatgtcaaagtctccaagcatgaat

SEQ ID NO: 222 - DNA, 741 bp, Triticum aestivum
tttcctcccaaggctgctaggactgtggcagacatcattctgaagtgccttcatagggatccatccgaaaggcctacgatgagggccgtcgtggagtctctagcaagcgtccaggacataaaggtcccctgccggtatcctcttcaagtaccgtccgccgcaccgaggaaagtgatgctaaaatccacgagtctcaacggcattgttcctcagcatcctgtcatgaccttctcgccgtcgcctccttcgcgcaaccagcacctggtgtcaccgagatcatcgacgtctgcgctgcttcccccaaggaactgctcttccaccatcaccctggactaccccagggtaagctcggtcaagaaatcgccccccaacatcatgcggagacctggcgtcgagggtttttgattgtccatatagtgtcggattttcttctctttgccttgatttatttgttgttttggttagcctagcgagtgatctcagtgctatgggatatactatgttgcaaggacatgtgaaaaagggcagagtgaagcgtagatagtagaaccagcttgtagatacttgtcgttctctgattggatgggggtcatggaagaagtgtgtgttgagtggggcttgtaaccccactatgcaataaacgtgggttggttggtcggtcggtatttgctcgccgtcaaacatttcagctgtttctttcttctcttgaatgctaagttttgttgctgctagtcgtggaat

SEQ ID NO: 223 - DNA, 2039 bp, Zea mays; identical to SEQ ID NO: 216

SEQ ID NO: 224 - DNA, 768 bp, Lactuca sativa
accgactgatggccgctagtcggggaagaacacgaagaatccaaaacccgtggcagcggcggaggcggaggcgggttgccgcctgtcccgcagccgctgccgcttcctgcaccgcattcacgccaacttcgaaaaccatcgcggaatgcttttaaagattgagtggcggtgagttgggcatgctgccagcctcttaatacttccggaccctctgccacttccgccatcgggaaccacccatcttccgccaatgattccggcatctttaccgacatctggaacacttaagaacttcacatattgaagaaatcgcagctgcttgccacaacattttcaccctgacagatgcgtgtctgaaggtctttcttctgttatgtatagagcttcttttggagaagatacttctaatttaaagaatcttcaagccactgttaccagtctccatccttcaactcagggtttgaaggaatttgtgagtgaagtgaacacgctagcatcattgcaacacccttatctctgtaaatagattggtttccatgcgcgtgagggatctgatagaagaatgttggtttacgagaggctttttcatggaagcttagatcggcttttatatggtacaacagatggcccacctattgattgcaatgcaagaatgaaagtcgcactctgtgctgctcaagggcttacttttttgcatgaggaaggaccatttcaggcgatgtttcatgaattttccactgctaatatacaaattgataaagattttag

SEQ ID NO: 225 - DNA, 1637 bp, Gossypium spp.
ctttttcctctcaaacctctctcacactgataaacttttctctccattacctttctttgacttgcaaagttgttctcctcaaactaaccaaacaagggattctgggttttcagctttctctgttttcctactctctttcgcctttgcatgacctgcttacatagaaacataaaagtccgaaatacaatttaggtggtttgtatataagatggggtgttttacagttttgagaagcaacaagaaaaagtccaaacagtcagtttttgttaaacacattgctcataaagagcatattcctaccatgctgcctgagccccaaattcagacacgatcactgcaatctgcacccccaagttttataaccagagtaaaaccaattcaatctaataacaaggcaagctgcaataggacacgtgcattatctgctccgtcaagtcttgatgctgctgagcaagatgaccttgcgtcagttgaatttgaagaacaagaagagttgaagagtcgtgttggtttagtcaaggaacagaagtcatcaagtccacagcctcttccacttccatctccccacagtactgcgctgaagacaatgggaagttttaaagcagggaatgttagtggccctctttttgcttcgggaccattacccctgcctccctctggaacactacgtaacttcgcctacgaagaaattgcagctgcttgccatcatttctcttctgatcgatgcacatctgagggtctatcttctgttatgtacaaggcatccttcggagatgacacatcaagttcaaagaagtttgaagctactgttactcgccttcacccatccactcagggtttaagggaatttataaacgaagtaaacactcttgcatcattgcaacatccaaatctctgtaaattgcttgggtaccatgcacgtgataattcagaacaacgaatgttggtctatgagaggttatttcatggaagcttagaccggcttttatacgggagatcggatggaccgccacttgattggaatactcgcatgaaaattgctttatgttctgcacagggtcttactttcttgcatgaggaaggaccatttcaggcaatgtacaatgaattttcgactgccaacatacagatcgacaaggatttcagtgcaaagctctcaggatatgggtgcgttggtcatatcccagagacagaagagatctccagtaattcagttgctgtggcaaatatatccgtagagactctggagagagggcgactaactccaaagagcaatgtttggagttttgggatcattctacttgaattactcactggccggaagaaccttgacaaccgttatcccaaggaagagaggaacctagtgaagtggagccggccattcctagccgacaattgtagattgtcactcatcatggatcctcagctcaaaggtcgctttcctatgaaagctgcccgtacggtggctgacattgcacaaaggtgtctccagatggacccatcagagaggccaaccatgagaaccatcgttgagcatctcaaaatcatccaagacctgaaatactcttgtcggtttcctctgcaagatccagcagcaattgctggaaaacagatgtcaaggtcaccgagtctcaacg

SEQ ID NO: 226 - DNA, 2193 bp, Oryza sativa; identical to SEQ ID NO: 54

SEQ ID NO: 227 - DNA, 56 bp, Artificial sequence
  primer: prm06729
ggggacaagtttgtacaaaaaagcaggcttaaacaatgatgggttgcttcactgtc

SEQ ID NO: 228 - DNA, 50 bp, Artificial sequence
  primer: prm06730
ggggaccactttgtacaagaaagctgggtatggacaatcaaaaaccctca

SEQ ID NO: 229 - DNA, 1176 bp, Arabidopsis thaliana
cttcaactgctgcgtctagctgtccttccttcttcatttgcttcttcttctctagctcagcgcggatcgctgcagtagtaccctgacgtagcctttcttcttcctttactttctcatcttctatctctcaaaagaaaagcagacaactttatttgcaaaaacagagtttttttttcttatcttgagaaagttcaacagaagatgatgttcgagaaagacgatctgggtctaagcttaggcttgaattttccaaagaaacagatcaatctcaaatcaaatccatctgtttctgttactccttcttcttcttcttttggattattcagaagatcttcatggaacgagagttttacttcttcagttccaaactcagattcgtcacaaaaagaaacaagaactttcatccgaggaatcgacgtgaacagaccaccgtctacagcggaatacggcgacgaagacgctggagtatcttcacctaacagtacagtctcaagctctacagggaaaagaagcgagagagaagaagacacagatccacaaggctcaagaggaatcagtgacgatgaagatggtgataactccaggaaaaagcttagactttccaaagatcaatctgctattcttgaagagaccttcaaagatcacagtactctcaatccgaagcagaagcaagcattggctaaacaattagggttacgagcaagacaagtggaagtttggtttcagaacagacgagcaagaacaaagctgaagcaaacggaggtagactgcgagttcttacggagatgctgcgagaatctaacggaagagaaccgtcggctacaaaaagaagtaacggaattgagagtacttaagctctctcctcagttctacatgcacatgagcccacccactactttgaccatgtgcccttcatgtgaacacgtgtcggtcccgccaccacaacctcaggctgctacgtcagcgcaccaccggtcgttgccggtcaatgcgtgggctcctgctacgaggatatctcacggcttgacttttgacgctcttcgtcctaggtcctaagtctttttacttgcaaccaaagggcattttggtcgttttttaagtttcatggaccagatatgcatgtagttgttaacatgtatgtattttcttagaaagaaagaaaaacagattaatatt

SEQ ID NO: 230 - protein, 284 aa, Arabidopsis thaliana
MMFEKDDLGLSLGLNFPKKQINLKSNPSVSVTPSSSSFGLFRRSSWNESFTSSVPNSDSSQKETRTFIRGIDVNRPPSTAEYGDEDAGVSSPNSTVSSSTGKRSEREEDTDPQGSRGISDDEDGDNSRKKLRLSKDQSAILEETFKDHSTLNPKQKQALAKQLGLRARQVEVWFQNRRARTKLKQTEVDCEFLRRCCENLTEENRRLQKEVTELRALKLSPQFYMHMSPPTTLTMCPSCEHVSVPPPQPQAATSAHHRSLPVNAWAPATRISHGLTFDALRPRS

SEQ ID NO: 231 - DNA, 3171 bp, Arabidopsis thaliana
gacaatccgaaattaggtaaccatgttcattgaatttatcgtttcaacacattcgaatcactgagtcctacgtttcagtttaattccctgatgcacattttgaattcggtttgcgtattggtcttcgagttttccgtcggcggccatggacgcgttcaaggaggagatagaaatcgggagctcggtggagtctttaatggagctattggattcgcagaaggtgctttttcatagccagatcgatcagctccaagatgtcgtcgttgcgcaatgcaaacttaccggcgttaatccccttgcgcaagaaatggctgctggtgctttgtccattaaaattggaaagcggccaagagacttgttgaatcctaaggctgttaagtatctacaagcagttttcgcaattaaagatgctattagtaagagggaatctcgggagataagtgctttatttggcatcacagtcgcccaggttcgagaattttttgttactcaaaagacaagagtgaggaaacaggtgaggctttcaagggagaaagtagttatgtccaatacgcatgctttacaagatgatggtgttccggaaaataacaatgccacaaatcatgttgaacccgttcccttgaactctatacatccggaggcatgttctataagctggggtgaaggtgaaacagtggcacttattccacctgaagatattccacctgacatcagcgattcagacaaatactttgttgagaatatattttctctgctgcgtaaagaggaaacattttcaggccaggtgaaactaatggagtggatcatgcagatacaagatgcttctgtgctgatctggtttttatcaaaaggaggggttttgatacttacaacatggttaagtcaagctgctagtgaagagcaaacaagtgtcttacttcttatcctgaaggttctttgtcatttacctctccacaaagcatctcctgaaaatatgtctgccatattacaaagcgttaatggacttcgtttctataggatatcagacatatcaaacagggcaaaaggtttgttatcaaggtggaccaagttatttgcgaaaatccaagctatgaagaaacaaaatcgtaacagttcgcaaattgattcgcagagtcaattgcttctgaaacagagtattgctgaaatcatgggtgatagtagcaatcctgaagatattcttagtctctcaaatggaaagtcagagaatgtcaggaggattgaatcgtcacagggtccaaaactgttgcttacttctgcagatgattccaccaagaaacacatgcttggttcaaatccatcgtataacaaagaacgcaggaaagtacagatggtggaacaaccaggccaaaaagctgctggaaagagtccgcagacagtaagaataggaacttcaggtcgaagccgcccaatgtctgctgatgatattcagaaagcaaagatgcgtgccctttatatgcagagcaagaacagtaaaaaggatcctttaccaagtgccattggtgattcgaaaatcgttgctcctgagaagcccttggctcttcattcagccaaggattctccacctattcagaacaatgaagctaagactgaagacacacctgtactctcgactgttcagcccgtcaatggattttcaactattcagcccgtcaatggaccttcagctgttcagcccgtcaatggacctttggctgttcagcctgtcaatggaccttcggctcttcagcccgtcaatggaccttcggccgtaattgtcccggtacaagctgatgaaattaaaaaaccttcaacacctcctaaaagcatttctagtaaggtgggagttatgatgaaaatgagttcacaaactattctcaagaattgcaagagaaaacagattgattggcatgtaccaccaggaatggaacttgacgaactctggagagtagccgctggtggtaatagcaaggaggctgatgttcagagaaacagaaaccggcgagaaagagaaacaacatatcagtctcttcaaactataccgttgaaccctaaagaaccatgggatagggaaatggactatgatgacagtttgacccctgaaattccatctcaacagccaccagaagaaagtttaacggaaccacaggattcacttgatgaacgaagaattgctgctggtgctgccacaacctcttcatctctaagcagtcctgaacctgatctcgagttattagctgcgttacttaagaacccagatcttgtttatgcactaacttcgggaaaacccagtaatttagccggccaagatatggtaaaactgcttgatgtgattaagactggtgcaccaaactcaagcagtagctcaaataaacaggttgaagaaagggtcgaagtttcccttccatctcccactccatcaactaatcctggaatgagtggatggggacaagaagggattcggaatccattttcaaggcaaaaccaagttggtactgcagttgctagatcgggtacacagcttcgtgttggttcaatgcaatggcatcaaacaaatgaacaatcaatcccacgacatgctccatcagcatacagtaactcgatcacattggctcacacagaaagagaacagcaacaatatatgcaaccaaaacttcatcacaatttacattttcaacaacaacaacaacaaccaatctcaacaacctcgtatgcagttagggaaccagtaggacaaatgggaacaggtacatcgagttcatggaggagtcagcagagtcagaacagttactactcacatcaagaaaacgagattgcatcggcttcacaagttacttcataccaagggaatagccagtacatgagtagcaatccaggatatgaatcatggagtcctgataatagcccaagtaggaaccagcttaacatgaggggacaacaacaacaagcatcaaggaaacatgattcttctactcatccatattggaaccaaaacaaaagatggcgttaaaccatatataagactatggttctttggtcctcaatatttgcttgtcatggttgaattagcattatactctgttcagacacagattttcatttttaactcacaacagattcatcagagataataaactaaaagaaagaatgaatggataaagttattactgtctc

SEQ ID NO: 232 - protein, 953 aa, Arabidopsis thaliana
MDAFKEEIEIGSSVESLMELLDSQKVLFHSQIDQLQDVVVAQCKLTGVNPLAQEMAAGALSIKIGKRPRDLLNPKAVKYLQAVFAIKDAISKRESREISALFGITVAQVREFFVTQKTRVRKQVRLSREKVVMSNTHALQDDGVPENNNATNHVEPVPLNSIHPEACSISWGEGETVALIPPEDIPPDISDSDKYFVENIFSLLRKEETFSGQVKLMEWIMQIQDASVLIWFLSKGGVLILTTWLSQAASEEQTSVLLLILKVLCHLPLHKASPENMSAILQSVNGLRFYRISDISNRAKGLLSRWTKLFAKIQAMKKQNRNSSQIDSQSQLLLKQSIAEIMGDSSNPEDILSLSNGKSENVRRIESSQGPKLLLTSADDSTKKHMLGSNPSYNKERRKVQMVEQPGQKAAGKSPQTVRIGTSGRSRPMSADDIQKAKMRALYMQSKNSKKDPLPSAIGDSKIVAPEKPLALHSAKDSPPIQNNEAKTEDTPVLSTVQPVNGFSTIQPVNGPSAVQPVNGPLAVQPVNGPSALQPVNGPSAVIVPVQADEIKKPSTPPKSISSKVGVMMKMSSQTILKNCKRKQIDWHVPPGMELDELWRVAAGGNSKEADVQRNRNRRERETTYQSLQTIPLNPKEPWDREMDYDDSLTPEIPSQQPPEESLTEPQDSLDERRIAAGAATTSSSLSSPEPDLELLAALLKNPDLVYALTSGKPSNLAGQDMVKLLDVIKTGAPNSSSSSNKQVEERVEVSLPSPTPSTNPGMSGWGQEGIRNPFSRQNQVGTAVARSGTQLRVGSMQWHQTNEQSIPRHAPSAYSNSITLAHTEREQQQYMQPKLHHNLHFQQQQQQPISTTSYAVREPVGQMGTGTSSSWRSQQSQNSYYSHQENEIASASQVTSYQGNSQYMSSNPGYESWSPDNSPSRNQLNMRGQQQQASRKHDSSTHPYWNQNKRWR

SEQ ID NO: 233 - DNA, 501 bp, Oryza sativa
atggagcagcagcttcctcttcttgcacctgactctaaggctgccacgtcgtcccccttgtgcctcaccttggacaacccaacctccacatccacctcgccggcggtgccgtcgtcggcgccgccgccggcagccgccttggaaccttctagacaatctttccatgagagggaaacggatgcaatcaaagccaagatcatgtcgcaccccctctacccggctctcctcagagccttcatagattgccagaaggtcggagctccgccggaggtcgtcggccggctttccgccctcgccggcgagctcgactcgcgtgcagaagacaggtaccttcaagggcagtcgtcagacccggagctcgacgagtttatggaaacctacattgatatgctggtgagctacaggcaggagctgacaagaccaattcaagaggccgaccagttcttcagaaacatggaggcacagatcgactcgtttacactagagatgtgcagtttctga

SEQ ID NO: 234 - protein, 166 aa, Oryza sativa
MEQQLPLLAPDSKAATSSPLCLTLDNPTSTSTSPAVPSSAPPPAAALEPSRQSFHERETDAIKAKIMSHPLYPALLRAFIDCQKVGAPPEVVGRLSALAGELDSRAEDRYLQGQSSDPELDEFMETYIDMLVSYRQELTRPIQEADQFFRNMEAQIDSFTLEMCSF

SEQ ID NO: 235 - DNA, 879 bp, Oryza sativa
atggctcaggaggacgtcggtcacctgagcgacgccggcctggcgctgggcctgtccctcggcgggggaggaggagggacgaccgacgcggcggcggcgcaccgtggcggctgccggcggccgtcgccgtcgtcgcagtgcccgccgctggagccgtcgctgaccctgagcttgcccgacgacgcggcggccggcgcggccgcgaccgcgaccgcgaccgcgtccggcgggggcggccctgcgcacagcgtgtcgtcgctgtccgtcggcgcggcggcggcggcggccgtgaagagggagcgcgcggaggaggccgacggcgagagggtgtcgtcgacggcggccgggcgtgacgacgacgacgacgggagcacccgcaagaagctccggctgaccaaggagcagtccgcgctcctggaggaccgcttccgggagcacagcacgctcaacccgaagcagaaagtcgctttagcgaagcaactgaacctcaggccaaggcaggtggaggtctggttccaaaacagaagagcaaggacaaagctgaagcagacggaggtggactgcgagttcctgaagcgctgctgcgagacgctcaccgaggagaaccgtcggctgcagcgcgagctgcaggagctccgcgcgctcaagttcgccccgccgccgccgtcctcggcggcccaccagccgtcgccggcgccaccggcgccgttctacatgcaactcccggccgccacgctcaccatctgcccgtcctgcgagcgcgtcggcgggcccgcgtccgccgccaaggtcgtcgccgccgacgggaccaaggccggccccggccggaccaccacccaccacttcttcaaccccttcacccactccgccgcctgctga

SEQ ID NO: 236 - protein, 292 aa, Oryza sativa
MAQEDVGHLSDAGLALGLSLGGGGGGTTDAAAAHRGGCRRPSPSSQCPPLEPSLTLSLPDDAAAGAAATATATASGGGGPAHSVSSLSVGAAAAAAVKRERAEEADGERVSSTAAGRDDDDDGSTRKKLRLTKEQSALLEDRFREHSTLNPKQKVALAKQLNLRPRQVEVWFQNRRARTKLKQTEVDCEFLKRCCETLTEENRRLQRELQELRALKFAPPPPSSAAHQPSPAPPAPFYMQLPAATLTICPSCERVGGPASAAKVVAADGTKAGPGRTTTHHFFNPFTHSAAC

SEQ ID NO: 237 - DNA, 744 bp, Oryza sativa
atggcgcaagatgatgaggacgtgggtctagctctgggcctctccctgggctccggcggccacaggcggcagagagaaagtagagacgaagcgccgtcgtcggcggcggcgtccctgctgacgctgaggctcccggcagagagcggggggcagccgcaggtggtggtgaagagggaggtggtgcgggcggaagaggaggagtacgaatacgagtacgagagggcgctctactcgtcgtcggctgcggcggcggacgacgacgagggctgcaacagccggaagaagctgaggctgagcaaggagcagtcggctctgctggaggatcgcttcaaggagcatagcactctcaaccctaagcaaaaggttgctttggcgaagcagctaaacctgaggccaaggcaagttgaggtgtggttccaaaacagaagagccaggacgaagctgaagcagacggaggtggattgcgagcttctgaagcgctgctgcgagacgctgacggaggagaaccgacgcctccatcgtgagctccagcagctcagggctctgacccactccaccgccgccggcttcttcatggccaccaccctccccgtccccgccgccacgctctccatctgcccctcctgcgagcgcctcgccaccgccgccgccgccggagcttcccccaccgccgccgccgaccgcaccaacaagcccaccgccccgcacttgttcagccctttcgccaagtccgccgcctgctag

SEQ ID NO: 238 - protein, 247 aa, Oryza sativa
MAQDDEDVGLALGLSLGSGGHRRQRESRDEAPSSAAASLLTLRLPAESGGQPQVVVKREVVRAEEEEYEYEYERALYSSSAAAADDDEGCNSRKKLRLSKEQSALLEDRFKEHSTLNPKQKVALAKQLNLRPRQVEVWFQNRRARTKLKQTEVDCELLKRCCETLTEENRRLHRELQQLRALTHSTAAGFFMATTLPVPAATLSICPSCERLATAAAAGASPTAAADRTNKPTAPHLFSPFAKSAAC

SEQ ID NO: 239 - DNA, 1065 bp, Oryza sativa
atggagctggggctgagcttgggggatgcggtgaccgtggcggatggcgggaggctggagctggttcttgggctcggggttggggttggggctggggtgaggagaggagaggaggaggagagggggaggagggaggatgtggtgggagctgggaggtgggcggcgatggcggcggcctcgccggagccgtcggtgcggctcagcctcgtgtcgagcctcgggctccactggccttccgagaccgggcgttcggaggcggcggcgcgtgggttcgacgtgaaccgggcgccgtcggtggcggcgggcgcgccggggatggaggacgacgaggagggcccgggcgccgcgccggcgttgtcgtcgtcgcccaacgacagcgggggatccttcccgctggacctctccgggcaaggcctccgtggccacgccgaggcggcggcgcagggtggcggcggcggcggcggcggcgagcggtcgtcctcgcgcgcgagcgacgacgacgagggcgcgtccgcgcgcaagaagctgcgactctccaaggagcagtcggcgttcctcgaggagagcttcaaggagcacagcacgctgaatcccaagcagaaggtggcgctggcgaagcagctcaacctccggccgcggcaagtggaggtctggttccagaaccgccgagccaggacgaagctgaagcagacggaggtggactgcgagtacctgaagcgctgctgcgagacgctcaccgaggagaaccggcggctgcacaaggagctcgccgagctgcgcgcgctcaagacggcgcgccccttctacatgcacctcccggccacgaccctctccatgtgcccctcctgcgagcgtgtcgcctccaacccggccaccgcttcgacctccgcccccgccgcggccacgtccccggcggcggcgccgaccgcggccgcaagaaccgccgtcgcgtcgcccgagccgcaccggccgtcgtccttcgccgcgctgttcgcggcacccctcggcttcccgctgaccgccgcccagccgcggccgccgccgccggcgagcaactgcctgtaa

SEQ ID NO: 240 - protein, 354 aa, Oryza sativa
MELGLSLGDAVTVADGGRLELVLGLGVGVGAGVRRGEEEERGRREDVVGAGRWAAMAAASPEPSVRLSLVSSLGLHWPSETGRSEAAARGFDVNRAPSVAAGAPGMEDDEEGPGAAPALSSSPNDSGGSFPLDLSGQGLRGHAEAAAQGGGGGGGGERSSSRASDDDEGASARKKLRLSKEQSAFLEESFKEHSTLNPKQKVALAKQLNLRPRQVEVWFQNRRARTKLKQTEVDCEYLKRCCETLTEENRRLHKELAELRALKTARPFYMHLPATTLSMCPSCERVASNPATASTSAPAAATSPAAAPTAAARTAVASPEPHRPSSFAALFAAPLGFPLTAAQPRPPPPASNCL

SEQ ID NO: 241 - DNA, 1089 bp, Oryza sativa
atggagctggggttgagcttgggggaggctatggcggatgctgggagggagctggttcttgggcttgggatggggaggagggaggaggcggcggaggcggggaggagggatcatgaggtgaggagggagctggagttcgggtcgatgtcgagcaggtgcggtggttcttcgccggagccgacggtgcggctcacgcttctgcccatggtgcccggccttggcctcccatggccgccgccgccgccgccgtcgtccgagagcaggcatttggaggcgtcgacgcggggattcgacgtgaaccgcccgccgtcgtccggcggcggcggcggcggcggcggcgcggaggaggagcaggacgacgtggccggggcggcactctcgtcgtcccccaacaacagcgccggatccttcccgatggatgacttctccgggcacggcctcggcggcaacgacgcggcccctggcggtggcggcggcgaccgctcgtgctcccgcgccagcgacgaggacgacggcggctccgcgcgcaagaagctccgcctctccaaggagcagtccgcgttcctcgaggagagcttcaaggagcacagcaccctaaaccccaagcagaagctggcgctggcgaagcagctcaacctccggccgcgccaggtggaggtgtggttccagaaccgccgcgccaggacgaagctgaagcagacggaggtggactgcgagtacctgaagcggtgctgcgagacgctgacggaggagaaccggcggctgcagaaggagctcgccgagctccgggcgctcaagacggtgcaccccttctacatgcacctcccggcgacgacactctccatgtgcccctcctgcgagcgcgtcgcctccaactccgccccggccaccgcctcctccgccgcaacatcgtcgacggccgcgccgcccgcggcaccctcatccggcggcattgcggccacctcctcctccgccgccgccgccgcggcgccggaccacaggccgtcgtcgttcgccgcgctgttctcgtcgccgcgtggcttcccgctatccgtagccccgcaggcgcagccgccgacgagctcgtga

SEQ ID NO: 242 - protein, 362 aa, Oryza sativa
MELGLSLGEAMADAGRELVLGLGMGRREEAAEAGRRDHEVRRELEFGSMSSRCGGSSPEPTVRLTLLPMVPGLGLPWPPPPPPSSESRHLEASTRGFDVNRPPSSGGGGGGGGAEEEQDDVAGAALSSSPNNSAGSFPMDDFSGHGLGGNDAAPGGGGGDRSCSRASDEDDGGSARKKLRLSKEQSAFLEESFKEHSTLNPKQKLALAKQLNLRPRQVEVWFQNRRARTKLKQTEVDCEYLKRCCETLTEENRRLQKELAELRALKTVHPFYMHLPATTLSMCPSCERVASNSAPATASSAATSSTAAPPAAPSSGGIAATSSSAAAAAAPDHRPSSFAALFSSPRGFPLSVAPQAQPPTSS

SEQ ID NO: 243 - DNA, 771 bp, Oryza sativa
atggagaggcaaggcttggatcttggcctgagcctcgggctaggcttgacgacggcggcgacatggccggctgctgggttctgtctgaactccggcatggcggagcaggaagtgatcaggcgtgatgatgtggttgcggcgacggcggcggaggatgagaggttcgcgtgctcacccggcagcccggtgtcgagcggcagcgggaagcgaggcagcggcagcggcagcggcgacgaggtcgacgacgccggctgcgacgtcggcggcggcggcgcgcgcaagaagctgcggttgtccaaggaccaggccgccgtcctcgaggagtgcttcaagacgcaccacaccctcactccgaagcagaaggtggcgctggcgaagagcttgaacctgcggccgcggcaggtggaggtgtggttccagaaccgccgcgcgaggacgaagctgaagcagacggaggtggactgcgagcacctcaagcggtggtgcgaccagctcgccgacgacaaccgccgcctccacaaggagctcgccgagctcagggcgctcaaggccacgcccacaccgcccgccgccgcgccgccattgaccaccctcacaatgtgcctctcctgcaagcgcgtcgccaatgccggcgtgccctcgccggcggcggcgatattccccggccacccccagttcttgtgcggattcagagatcacgccggagcagcgtcgtcgtcgtacggcggcgcatcatctggactcgcgaaggcggtcagggcggcgaggtag

SEQ ID NO: 244 - protein, 256 aa, Oryza sativa
MERQGLDLGLSLGLGLTTAATWPAAGFCLNSGMAEQEVIRRDDVVAATAAEDERFACSPGSPVSSGSGKRGSGSGSGDEVDDAGCDVGGGGARKKLRLSKDQAAVLEECFKTHHTLTPKQKVALAKSLNLRPRQVEVWFQNRRARTKLKQTEVDCEHLKRWCDQLADDNRRLHKELAELRALKATPTPPAAAPPLTTLTMCLSCKRVANAGVPSPAAAIFPGHPQFLCGFRDHAGAASSSYGGASSGLAKAVRAAR

SEQ ID NO: 245 - DNA, 927 bp, Oryza sativa
atgatggatctcggcctcagcctcggcctcggcctcgcctcgcagggcagcctcacctcctccaccaccaccacctcctcccccggcgccggatcatcctccccgtgggccgccgcgctcaactccatcgtcggcgacgtgaggcgggatcaggccgcggcgcatgctgccgcggcggtgggggttggggttgggggcgaggagatgtaccaggggagggcgtccacgtcgccggacagcgcggcggcgctgtcgagcgcgagcgggaagagggagagggagctggagcggtcgggatccggggttgacgacgacgacggcgcggacggcgccggcgggcggaagaagctcaggctgtccaaggaccaggccgccgtgctcgaggagtgcttcaagacgcactccactctcaaccccaagcagaaggtggcgctggcgaacaggctggggctgcggccgcggcaggtggaggtgtggttccagaaccggagggcgaggacgaagctgaagcagacggaggtggactgcgagtacctgaagcggtggtgcgagcgcctcgccgacgagaacaagcgcctcgagaaggagctcgccgacctcagggcgctcaaggccgcgccctcgccggcgtccgcgtccgcgatgcagccctcctcctccgccgccgccacgctcaccatgtgcccctcctgccgccgcgtcgccaccgccggcgcgccgcaccagcctaaccaccaacaatgccatcccaaatctaacaccaccatctcctcctcctccaccgccgccgccgccgtcgccgtcgccggcggcaacgtgctgcccagccactgccagttcttcccggccgccgccgccgccgccgaccggacaagccagagcacgtggaacgccgccgcgccgctcgtcaccagagagctcttctag

SEQ ID NO: 246 - protein, 308 aa, Oryza sativa
MMDLGLSLGLGLASQGSLTSSTTTTSSPGAGSSSPWAAALNSIVGDVRRDQAAAHAAAAVGVGVGGEEMYQGRASTSPDSAAALSSASGKRERELERSGSGVDDDDGADGAGGRKKLRLSKDQAAVLEECFKTHSTLNPKQKVALANRLGLRPRQVEVWFQNRRARTKLKQTEVDCEYLKRWCERLADENKRLEKELADLRALKAAPSPASASAMQPSSSAAATLTMCPSCRRVATAGAPHQPNHQQCHPKSNTTISSSSTAAAAVAVAGGNVLPSHCQFFPAAAAAADRTSQSTWNAAAPLVTRELF

SEQ ID NO: 247 - DNA, 936 bp, Oryza sativa
atggagatgatggttcatgggaggagagacgagcagtatggcgggctcaggctcgggcttgggcttgggctcagcctcggcgtcgccggtggtgcagccgacgacgagcagccgccgccgcgccgtggtgccgccccgccgccgcagcagcagctgtgcggctggaacggcggcggtctcttctcctcgtcttcctccgatcatcgggggaggtcggcgatgatggcgtgccacgacgtcatcgagatgccgttcctgcgggggatcgacgtgaaccgtgcgccggcggcagagacgaccacgacgacggcgagggggcccagctgcagcgaggaagacgaggagcccggcgcgtcctcccccaacagcacgctctccagcctcagcggcaagcgcggcgcaccatctgccgccaccgccgccgccgccgccgccagcgacgacgaggactccggcggcggatcccgcaagaagctccgcctctccaaggaccaagccgccgtcctcgaggacaccttcaaagagcacaacaccctcaatcccaagcagaaggcggcgctggcgaggcagctgaatctgaagccgcggcaggtggaggtgtggttccagaacaggagggcgaggacgaagctgaagcagacggaggtggactgcgagctgctcaagcgctgctgcgagacgctcaccgacgagaaccgccgcctccaccgcgagctccaggagctccgcgccctcaagctcgccaccgccgccgccgcgccgcaccacctctacggcgcccgcgtcccgccgcccaccaccctcaccatgtgcccctcctgcgagcgcgtcgcctccgcagccaccaccacccgcaacaactccggcgccgcccccgcgcggccggtgcccacccgcccgtggccgccggcggcggcgcagaggtcgtcggcgtag

SEQ ID NO: 248 - protein, 311 aa, Oryza sativa
MEMMVHGRRDEQYGGLRLGLGLGLSLGVAGGAADDEQPPPRRGAAPPPQQQLCGWNGGGLFSSSSSDHRGRSAMMACHDVIEMPFLRGIDVNRAPAAETTTTTARGPSCSEEDEEPGASSPNSTLSSLSGKRGAPSAATAAAAAASDDEDSGGGSRKKLRLSKDQAAVLEDTFKEHNTLNPKQKAALARQLNLKPRQVEVWFQNRRARTKLKQTEVDCELLKRCCETLTDENRRLHRELQELRALKLATAAAAPHHLYGARVPPPTTLTMCPSCERVASAATTTRNNSGAAPARPVPTRPWPPAAAQRSSA

SEQ ID NO: 249 - DNA, 1674 bp, Arabidopsis thaliana
aaaatggaaaactcagacactgattcagaagttttcttttggtttcagaaccaaaaccaaaaccatagccataagtttccttcttcttgttttcctccgagctctcactctgctttttatggatctagctcaatgatcaacacagagactgcaactatggacgaagaagacgtatgtgagagctacatgatgcgtgagataaccaagaaacggaagctaacaccgatccaattgcgtttactagaggagagtttcgaagaagagaaaagactcgaaccagacaggaaactctggctagccgagaagctagggctgcagccaagccaagtcgctgtctggttccaaaacagaagagctagatacaagaccaaacagctcgaacacgactgtgactctcttaaagctagctatgctaagctcaagactgactgggacattctctttgtacaaaaccaaaccctcaagagcaaggtacagtttcttaatagattaacaagccactattttcaagagtctgttcaaaattttgatgacacattcaaacaggtcgatcttctcaaagagaagctgaaaatgcaagagaatcttgaaactcagtctattgagaggaaaagacttggggaagaaggtagttcggtgaaaagcgataacacgcagtacagtgaagaagaaggtttggagaatcaatacagtttcccggagcttgcagttctcggattttattatgatccaaccttaactgcttcaaatctaagacaagaacctttgaaagtcacgtgtgcggatcagatgactcagatccaaatatctgacgtcacagaacctgcgagctccgcacataaaaaaattgaagtgacacagcgaagttcgagtatgagccgcaagagagataaaccctacacaaaccgtcacacaccggcgcgaatttcgaaacgccggcgaccatgggcgccttcgtcatcggagcacgatgagattatcgacaaaccgatcaccaaacctccgccgccaccggcgttggtagttatgggacttcccgccaactgttcagttctggagctaaaatctcgattcgagatctacggttcaatctcccgaatccgaatccataaagacggaattggctccgtttcgtatcgaaccgccgagtcagcagaagccgccattgctggtagtcacgagccttctttcggtatctccatcgattccaaaaagttggaggtggtttgggcgacggatccattggtgaagtggaaggaaggtgtgacggcgggagaaggaaaggagagaacgtcgtcgttttcgtcgaagcttttacgacctgtgatgcctttgagaaaacatgggagaagcagtaggttagcgtcagctattgttaatccgagaagtgataatactaaaggaattagtggagatggagggatatcatctccggcgacgacaagtgaagttaaacagagaaatatagtaacctacgacgatatcgtttaacaccattctactacaattatagtaactttgattcttttacatattttggcaattttatgagtttagctaatcctgttggtaatctcagttgtcgaatgttgtgaaatgagttgagttttgtttatttgtatgattgtaacttataagaaagagaaggattccaaaatgggtagaagattcaaa

SEQ ID NO: 250 - protein, 495 aa, Arabidopsis thaliana
MENSDTDSEVFFWFQNQNQNHSHKFPSSCFPPSSHSAFYGSSSMINTETATMDEEDVCESYMMREITKKRKLTPIQLRLLEESFEEEKRLEPDRKLWLAEKLGLQPSQVAVWFQNRRARYKTKQLEHDCDSLKASYAKLKTDWDILFVQNQTLKSKVQFLNRLTSHYFQESVQNFDDTFKQVDLLKEKLKMQENLETQSIERKRLGEEGSSVKSDNTQYSEEEGLENQYSFPELAVLGFYYDPTLTASNLRQEPLKVTCADQMTQIQISDVTEPASSAHKKIEVTQRSSSMSRKRDKPYTNRHTPARISKRRRPWAPSSSEHDEIIDKPITKPPPPPALVVMGLPANCSVLELKSRFEIYGSISRIRIHKDGIGSVSYRTAESAEAAIAGSHEPSFGISIDSKKLEVVWATDPLVKWKEGVTAGEGKERTSSFSSKLLRPVMPLRKHGRSSRLASAIVNPRSDNTKGISGDGGISSPATTSEVKQRNIVTYDDIV

SEQ ID NO: 251 - DNA, 1428 bp, Arabidopsis thaliana
aaggccacaacagatcttcttgttcctctctctcaatctctctctctaaaactcttattttcttcgtaagagatggaactagcgttgtctctaggcgacaatactaagaaacagttctcttttatggagaagaactcgaagattaataatccctctgtctcgtcgacatctacttccgagaaggatcttgggttctgcatggctttagatgttgcttttggtggtcacagatcgttgtcatcctcttcgtctccgtcggtagaggatgagaagaagaaaccggcgcccagagcaaaaaaatctgacgaatttagggtttcgtcttctgtagatccaccattacagcttcagcttcacttccctaattggctccctgagaacagtaaaggtcgacaaggaggaagaatgcccttaggagcagctacggttgtggaggaggaagaggaggaggaggaagcggtgcctagtatgtcagtatcgccgccggatagtgtaacgtcgtcgtttcaattggactttgggattaaaagttatggttatgagagaagaagcaataagagagatattgatgatgaagtggagagatcagcttcaagagccagcaacgaagacaacgatgacgagaatggatccactaggaagaaacttagactctccaaagaccaatctgcttttcttgaagacagcttcaaagaacacagtacccttaatcctgttcgtgtcccattctttacagtttttatttatttaaaatttgtctttcttgaatttattctatttttttagtaccaaattttagccttaatgcttttttttttctttctaaaacattgcagaaacagaagattgcattggcgaagcagttgaatcttcgtcctcgtcaggttgaagtctggtttcaaaacagacgagccaggacaaagctgaagcaaacggaagtggactgtgaatacctaaagagatgctgtgagtcactaaccgaagaaaaccggaggcttcaaaaagaggttaaagaattgagaaccttgaagacttccacacccttttacatgcaacttccggccactactctcactatgtgcccttcttgtgaacgtgttgccacttcagcagcacagccctccacgtcagctgcccacaacctctgtttgtccacgtcatcattgattccggttaagcctcggccggccaaacaagtttcatgaaagcacctgcgaaatacagtttgagcaaacggtcgagctagagtggttttaaaagttgtcttcttgtgtatatatttattttacttttcatattttattagagaccgctattttgaaagacgaatagattgattatccggttagtgttttgtttttcttagataggaccggataaaaaacagatggagcaaaagggttgacatgttttattgaatgatagagg

SEQ ID NO: 252 - protein, 237 aa, Arabidopsis thaliana
MELALSLGDNTKKQFSFMEKNSKINNPSVSSTSTSEKDLGFCMALDVAFGGHRSLSSSSSPSVEDEKKKPAPRAKKSDEFRVSSSVDPPLQLQLHFPNWLPENSKGRQGGRMPLGAATVVEEEEEEEEAVPSMSVSPPDSVTSSFQLDFGIKSYGYERRSNKRDIDDEVERSASRASNEDNDDENGSTRKKLRLSKDQSAFLEDSFKEHSTLNPVRVPFFTVFIYLKFVFLEFILFF

SEQ ID NO: 253 - DNA, 1167 bp, Arabidopsis thaliana
tgcccccagctagtcacatactcatgattgcaaaatctctctctctctctgcctctctatatattaacctttcttcttcctttactttctcatcttctatctctcaaaagaaaagcagacaactttatttgcaaaaacagagtttttttttcttatcttgagaaagttcaacagaagatgatgttcgagaaagacgatctgggtctaagcttaggcttgaattttccaaagaaacagatcaatctcaaatcaaatccatctgtttctgttactccttcttcttcttcttttggattattcagaagatcttcatggaacgagagttttacttcttcagttccaaactcagattcgtcacaaaaagaaacaagaactttcatccgaggaatcgacgtgaacagaccaccgtctacagcggaatacggcgacgaagacgctggagtatcttcacctaacagtacagtctcaagctctacagggaaaagaagcgagagagaagaagacacagatccacaaggctcaagaggaatcagtgacgatgaagatggtgataactccaggaaaaagcttagactttccaaagatcaatctgctattcttgaagagaccttcaaagatcacagtactctcaatccgaagcagaagcaagcattggctaaacaattagggttacgagcaagacaagtggaagtttggtttcagaacagacgagcaagaacaaagctgaagcaaacggaggtagactgcgagttcttacggagatgctgcgagaatctaacggaagagaaccgtcggctacaaaaagaagtaacggaattgagagcacttaagctctctcctcagttctacatgcacatgagcccacccactactttgaccatgtgcccttcatgtgaacacgtgtcggtcccgccaccacaacctcaggctgctacgtcagcgcaccaccggtcgttgccggtcaatgcgtgggctcctgcgacgaggatatctcacggcttgacttttgacgctcttcgtcctaggtcctaagtctttttacttgcaaccaaagggcattttggtcgttttttaagtttcatggaccagatatgcatgtagttgttaacatgtatgtattttcttagaaagaaagaaaaacagattaatatttttctagcttaaacc

SEQ ID NO: 254 - protein, 284 aa, Arabidopsis thaliana; identical to SEQ ID NO: 230

SEQ ID NO: 255 - DNA, 1194 bp, Arabidopsis thaliana
atttcacatctctctctctctataagaaccctagaagaaggtttctcttgtcctccatacacttagcacaactgataaatcttttgaggtaaaatcagctttagatcaaggtttttctagtcatctctactcataaagatcaaagcttttgctattctcattttctaccaagagacaatatcatgatgatgggtaaagaggatttgggtttaagtcttagcttgggatttgcacaaaaccatcctctccagctaaatcttaaacccacttcttcaccaatgtccaatctccagatgtttccatggaaccaaacccttgtttcttcctcagatcaacaaaagcaacagtttcttaggaaaatcgacgtgaacagcttgccaacaacggtggatttggaagaggagacaggagtttcgtctccaaacagtacgatctcgagcacagtgagtggaaagaggaggagtactgaaagagaaggtacctccggtggtggttgcggagatgaccttgacatcactctagatagatcttcctcacgtggaacctccgatgaagaggaagattacggaggtgagacttgtaggaagaagcttagactatccaaagatcaatccgcagttctcgaagacactttcaaagagcacaatactctcaatcccaaacagaagctggctttggctaagaagctaggtttaacagcaagacaagtggaagtgtggttccaaaacagaagagcaaggacaaagttaaagcagaccgaagtggattgcgagtatttgaaaagatgtgttgagaaattaacggaagagaatcggcggctcgagaaagaggcagcggaactaagagcattaaagctttcaccgcggttgtatggtcagatgagtccaccgaccacacttttgatgtgtccatcgtgtgaacgtgtggccggaccatcctcatctaaccacaaccagcgatctgtctcattgagtccatggctccaaatggcccatgggtcaacctttgatgtgatgcgtcctaggtcttaactttaatgctgcttctatgggttgtgtgtgggtcattgtactttttagattattgactctcagctaatgtatccttaaaagcctttttctacttttaaatttactttaatctaattaaattagttattcttgtcttcttgataacaaacaaatttataataat

SEQ ID NO: 256 - protein, 282 aa, Arabidopsis thaliana
MMMGKEDLGLSLSLGFAQNHPLQLNLKPTSSPMSNLQMFPWNQTLVSSSDQQKQQFLRKIDVNSLPTTVDLEEETGVSSPNSTISSTVSGKRRSTEREGTSGGGCGDDLDITLDRSSSRGTSDEEEDYGGETCRKKLRLSKDQSAVLEDTFKEHNTLNPKQKLALAKKLGLTARQVEVWFQNRRARTKLKQTEVDCEYLKRCVEKLTEENRRLEKEAAELRALKLSPRLYGQMSPPTTLLMCPSCERVAGPSSSNHNQRSVSLSPWLQMAHGSTFDVMRPRS

SEQ ID NO: 257 - DNA, 1284 bp, Arabidopsis thaliana
aataatgatggattgtaattagccacctgacaaaatctctcatcattcaaagtactatattaatcccctctcttcttcattaccatctcacatctctctctatttctcttccacaaagagtcctaacttcgagttgaaacaaacaccatttctcatctctatctcagaaagaacaaaccatttcgtgttctttctttctctattctcataaggaaatataattcctgaaactgttgagttcttgtgaaaggaaataaaaaacatgatgatgggcaaagaagatctaggtttgagcctaagcttagggttttcacaaaatcacaatcctcttcagatgaatctgaatcctaactcttcattatcaaacaatctccagagactcccatggaaccaaacattcgatcctacatcagatcttcgcaagatagacgtgaacagttttccatcaacggttaactgcgaggaagacacaggagtttcgtcaccaaacagtacgatctcaagcaccattagcgggaagagaagtgagagagaaggaatctccggaaccggcgttggctccggcgacgatcacgacgagatcactccggatcgagggtactcacgtggaacctcagatgaagaagaagacgggggcgaaacgtcgaggaagaagctcaggttatcaaaagatcagtctgcttttctcgaagagactttcaaagaacacaacactctcaatcccaaacagaagctagctttggctaagaagctgaacttgacggcaagacaagtggaagtgtggttccaaaacagaagagctagaaccaagttaaagcaaacggaggtagattgcgaatacttgaaacggtgcgtagagaagctaacggaagagaaccggagacttcagaaagaggctatggagcttcgaactctcaagctgtctccacaattctacggtcagatgactccaccaactacactcatcatgtgtccttcgtgcgagcgtgtgggtggcccatcatcatcgaaccatcaccacaatcacaggcccgtttctatcaatccgtgggttgcttgtgctggtcaggtggctcatgggctgaattttgaagccttgcgtccacgatcgtgattttttattttagtggtgggaaaagggtgttttggtatttttcgttatcgttatatagtctatctgtgtggggtcattgtaattttggatgattggccttctcatgaactagtcctatgtatgatgcaaccttaaaaagatttaaattagcaaaaattagttacaaactt

SEQ ID NO: 258 - protein, 283 aa, Arabidopsis thaliana
MMMGKEDLGLSLSLGFSQNHNPLQMNLNPNSSLSNNLQRLPWNQTFDPTSDLRKIDVNSFPSTVNCEEDTGVSSPNSTISSTISGKRSEREGISGTGVGSGDDHDEITPDRGYSRGTSDEEEDGGETSRKKLRLSKDQSAFLEETFKEHNTLNPKQKLALAKKLNLTARQVEVWFQNRRARTKLKQTEVDCEYLKRCVEKLTEENRRLQKEAMELRTLKLSPQFYGQMTPPTTLIMCPSCERVGGPSSSNHHHNHRPVSINPWVACAGQVAHGLNFEALRPRS

SEQ ID NO: 259 - DNA, 957 bp, Arabidopsis thaliana
atgggggaaagagatgatgggttgggtttgagtctaagcttgggaaatagtcaacaaaaagaaccatctctgaggttgaatcttatgccgttgacaacttcttcttcttcttcttcgtttcaacacatgcacaatcagaataacaatagccatccccagaagattcataacatctcttggactcatctgtttcaatcttctgggattaaacgtacaactgcagagagaaactccgacgccgggtcatttctaagaggtttcaacgtgaacagagctcagtcttcggtggcggtagtggacttggaagaagaagccgccgtcgtctcgtctccaaacagcgccgtttcgagtctgagtggaaataaaagggatcttgcggtggcgagaggaggagatgaaaacgaggcggagagagcttcttgctcacgcggagggggaagcggtggtagcgacgatgaagacggcggaaacggcgacggatcaaggaagaaactacggttatcgaaggatcaagctcttgttctcgaggagacttttaaagaacatagcactcttaatccgaagcaaaagctggctctagcaaaacagttgaatctaagggcaagacaagttgaagtgtggtttcagaaccgtagggcaaggacgaagctgaaacaaacggaggttgattgtgagtatttaaagagatgttgcgataatctgaccgaggagaatcgacggctgcagaaagaagtgtcggagctgagggcgttgaagttgtctccacatctctacatgcacatgactcctcctactactctcaccatgtgcccttcttgcgaacgtgtctcctcctctgccgccactgtgaccgctgctccttccactactactactcctacggtggtggggcggccaagtccacagcgattaactccttggactgctatttctctccagcaaaaatcaggtcgctag

SEQ ID NO: 260 - protein, 318 aa, Arabidopsis thaliana
MGERDDGLGLSLSLGNSQQKEPSLRLNLMPLTTSSSSSSFQHMHNQNNNSHPQKIHNISWTHLFQSSGIKRTTAERNSDAGSFLRGFNVNRAQSSVAVVDLEEEAAVVSSPNSAVSSLSGNKRDLAVARGGDENEAERASCSRGGGSGGSDDEDGGNGDGSRKKLRLSKDQALVLEETFKEHSTLNPKQKLALAKQLNLRARQVEVWFQNRRARTKLKQTEVDCEYLKRCCDNLTEENRRLQKEVSELRALKLSPHLYMHMTPPTTLTMCPSCERVSSSAATVTAAPSTTTTPTVVGRPSPQRLTPWTAISLQQKSGR

SEQ ID NO: 261 - DNA, 1357 bp, Arabidopsis thaliana
ccacaaccccatatctctttgtctgaaaaaactcttttgcatatataaataaatataagccatatcttttgaaactgtactgctgcacaagtgtagaggcagtggcacaacatctttaagaaagagagagagaaagagtcatttattcatttcctcgcttaaaaatcttgagcacccagacagaattcttctttcttctttctggggttgagaaaaatgagtgaaagagatgatggattggggctaagtttgagcttgagtttaggttttaatcaaaaggacccgtcttcgaggttaaatccaatgcctctggcttcttatgcatcttcatcacacatgcagcatatgcagcagagcaattataaccatcctcaaaagattcagaacacttggattaacatgtttcagtcatcagagagaaactcggacatgagatcgtttctccggggaatagacgtgaacagagctccatcgacggtggtggttgacgtggaggatgaaggcgccggagtttcgtctccgaacagcaccgtctcaagcgtgatgagcgggaagaagagcgagcgagagctaatggctgcggcaggtgcagttggaggaggtagagtagaagataatgagattgagagagcttcttgctcgctcggcggtggtagcgacgatgaagacggtagcgggaacggagatgacagttcgaggaagaaactccgattgtctaaagaacaagctttggttcttgaagaaacttttaaagaacatagtacactcaatccgaagcaaaagatggctttggctaagcaattgaatctgaggacgagacaagttgaagtgtggttccaaaaccgaagggcaaggacgaagctgaagcaaacggaagtagactgtgaatatcttaagagatgttgcgagaatctaacggatgagaatcggagattgcaaaaggaagtgagtgagcttagggctttaaagctttctccacacttatacatgcacatgaaacctcccactactctcacaatgtgtccttcttgcgagcgagtcgctgttacgtcatcttcgtcatcggtggctcctcctgtgatgaattcatcgtctccgatgggtccgatgagtccgtgggctgccatgcctctacggcaacgacctgctgctggttctcattagagtttaattagtctaaagataataggtttggtgatttgtttttattatattgttgaacggacttggaagttcttttcaagagttggtcccatgctcttctttcctttgttttattcagtttctatttatagctgaattctggataatggaaaatctactaatattattgtccaattattagtttggggaaaga

SEQ ID NO: 262 - protein, 315 aa, Arabidopsis thaliana
MSERDDGLGLSLSLSLGFNQKDPSSRLNPMPLASYASSSHMQHMQQSNYNHPQKIQNTWINMFQSSERNSDMRSFLRGIDVNRAPSTVVVDVEDEGAGVSSPNSTVSSVMSGKKSERELMAAAGAVGGGRVEDNEIERASCSLGGGSDDEDGSGNGDDSSRKKLRLSKEQALVLEETFKEHSTLNPKQKMALAKQLNLRTRQVEVWFQNRRARTKLKQTEVDCEYLKRCCENLTDENRRLQKEVSELRALKLSPHLYMHMKPPTTLTMCPSCERVAVTSSSSSVAPPVMNSSSPMGPMSPWAAMPLRQRPAAGSH

SEQ ID NO: 263 - DNA, 744 bp, Oryza sativa
atgatggagagggccgaggacctgcgcctgagcctcagtctcagctcgccgcttattgctcctcgtactcaccatgtcgccatgctgttccacgctcctccagagaaaagattcctggagatgccgctgctccctgctgcgaagcggagcgaggtcgtcgcggcagaagaggagcgcgcgggcctgcgcggcggcggcggcagcgacgaggaggacggtggctgcggcatcgacggctcacgcaagaagctccggctttccaaggaccagtccgccgtgctcgaggacagcttccgggagcaccccaccctcaaccccaggcagaaggcaactttggcgcagcagctcgggcttcggcctcggcaggtcgaggtgtggtttcagaacagacgcgcaaggacgaagctgaagcagacggaggtggactgcgagttcctgaagcgctgctgcgagacgctcacggaggagaaccggaggctgcagaaggaggtgcaggagctgcgagcgctcaagctcgtctcgccgcacctctacatgaacatgtccccgcccaccacgctcaccatgtgcccctcctgcgagcgcgtctccaacaccaataacaactccagcgccgccgccgccgccgaccgccgcggcatcaggactactactgccgcaggcggcggcagcgtcgtcgacaccgccgccgacgggggcatcctctgccaccgcccgatcgccgtccggccgcagcagtcatga

SEQ ID NO: 264 - protein, 247 aa, Oryza sativa
MMERAEDLRLSLSLSSPLIAPRTHHVAMLFHAPPEKRFLEMPLLPAAKRSEVVAAEEERAGLRGGGGSDEEDGGCGIDGSRKKLRLSKDQSAVLEDSFREHPTLNPRQKATLAQQLGLRPRQVEVWFQNRRARTKLKQTEVDCEFLKRCCETLTEENRRLQKEVQELRALKLVSPHLYMNMSPPTTLTMCPSCERVSNTNNNSSAAAAADRRGIRTTTAAGGGSVVDTAADGGILCHRPIAVRPQQS

SEQ ID NO: 265 - DNA, 846 bp, Oryza sativa
atgaggtcgtacatggacggcggcggcgcggcggcgtacgaggaggaggaggaggaggttgaggacgacgacggcggcggcggcggcggcggcggcggcggcggtggggggctcggggagaagaagcggcggctggcggcggagcaggtgcgggcgctggagcggagcttcgaggcggacaacaagctggacccggagcggaaggcccggatcgcccgcgaccttcgcctccaccctcgccaggtcgccgtctggttccagaaccgccgcgcgaggtggaagaccaagcagatcgagcgcgacttcgccgccctccgctcccgccacgacgccctccgcctcgagtgcgacgccctccgccgcgacaaggacgccctcgccgccgagatcgccgacctccgggacagggtggacggccagatgtccgtcaagctggaggccgtggccgcggacgaacaccagccgcctccgccgccgccgccgccgccactggcgtataacagcaaggtggtggacggctcgacggacagcgactcgagcgcggtgttcaacgaggaggcgtcgccgtactccggcgcggccatcgaccaccaccaccaccaaactccggcgagctacgacacggcggggttcacctccttcttcgcgccatccaccacgctcacctcgtccctctccttcccttccatgttccacgcgtcatcgcatttcgatggccaccaagaactcctcgtcggcggcggcggcgccggcgcagtggccgacgccgacctcggaggcgccggattcttcgccggcgacgagcacgccggcggcctctcctggtacggcgccgagggttggtag

SEQ ID NO: 266 - protein, 281 aa, Oryza sativa
MRSYMDGGGAAAYEEEEEEVEDDDGGGGGGGGGGGGGLGEKKRRLAAEQVRALERSFEADNKLDPERKARIARDLRLHPRQVAVWFQNRRARWKTKQIERDFAALRSRHDALRLECDALRRDKDALAAEIADLRDRVDGQMSVKLEAVAADEHQPPPPPPPPPLAYNSKVVDGSTDSDSSAVFNEEASPYSGAAIDHHHHQTPASYDTAGFTSFFAPSTTLTSSLSFPSMFHASSHFDGHQELLVGGGGAGAVADADLGGAGFFAGDEHAGGLSWYGAEGW

SEQ ID NO: 267 - DNA, 918 bp, Oryza sativa
atgaagaggcccagctgcagaggctcctccatggccatcatccatgacacctctgatcaacaagaggacaacatgaggtcgtacatggacggcggcggcgcggcggcgtacgaggaggaggaggaggaggttgaggacgacgacggcggcggcggcggcggcggcggcggcggcggtggggggctcggggagaagaagcggcggctggcggcggagcaggtgcgggcgctggagcggagcttcgaggcggacaacaagctggacccggagcggaaggcccggatcgcccgcgaccttcgcctccaccctcgccaggtcgccgtctggttccagaaccgccgcgcgaggtggaagaccaagcagatcgagcgcgacttcgccgccctccgctcccgccacgacgccctccgcctcgagtgcgacgccctccgccgcgacaaggacgccctcgccgccgagatcgccgacctccgggacagggtggacggccagatgtccgtcaagctggaggccgtggccgcggacgaacaccagccgcctccgccgccgccgccgccgccactggcgtataacagcaaggtggtggacggctcgacggacagcgactcgagcgcggtgttcaacgaggaggcgtcgccgtactccggcgcggccatcgaccaccaccaccaccaaactccggcgagctacgacacggcggggttcacctccttcttcgcgccatccaccacgctcacctcgtccctctccttcccttccatgttccacgcgtcatcgcatttcgatggccaccaagaactcctcgtcggcggcggcggcgccggcgcagtggccgacgccgacctcggaggcgccggattcttcgccggcgacgagcacgccggcggcctctcctggtacggcgccgagggttggtag

SEQ ID NO: 268 - protein, 305 aa, Oryza sativa
MKRPSCRGSSMAIIHDTSDQQEDNMRSYMDGGGAAAYEEEEEEVEDDDGGGGGGGGGGGGGLGEKKRRLAAEQVRALERSFEADNKLDPERKARIARDLRLHPRQVAVWFQNRRARWKTKQIERDFAALRSRHDALRLECDALRRDKDALAAEIADLRDRVDGQMSVKLEAVAADEHQPPPPPPPPPLAYNSKVVDGSTDSDSSAVFNEEASPYSGAAIDHHHHQTPASYDTAGFTSFFAPSTTLTSSLSFPSMFHASSHFDGHQELLVGGGGAGAVADADLGGAGFFAGDEHAGGLSWYGAEGW

SEQ ID NO: 269 - DNA, 936 bp, Oryza sativa
atgaagaggcccaccagcagcagccgaaaatccaaaaaacaaggagaggacctggcgttctctgaggagggcagcttgcccgcggtgaccatggagcagaaagatgaagccgagatggaggaggtggacgaggaggaggaggaggaggtcgacgaagacatggccggcgggcacgcggcgcagtcgccgtcgccgtcgtgcgggctgggcgagaagaagcggcggctggcgctggagcaggtgcgcgctctggagcggagcttcgacacggacaacaagctggacccggaccgcaaggcccgcatcgcgcgcgacctcggcctgcagccgcgccaggtcgccgtctggttccagaaccgccgcgcccggtggaagacgaagcagctcgagcgcgacttcgccgccctccgcgcccgccacgacgccctccgcgccgactgcgacgccctgcgccgcgacaaggacgccctcgccgccgagattcgggagctgagggagaagctgcccaccaagccggcggacacggcggcatcggtgaaggtagaagccggcaatgacgcggcggccggcgccgcggccgccacggtgtgcaaggacggctcgtcggacgacagcgactccagcgtggtgttcaacgacgaggcgtcgccgtactccggcgcggccttcattggattcggcccgtcgttcttggtcgacgacgcgtcggcggcaaccgtgggctgctcgtcgtcgctccccgcgctcgagtccaaatggcacggtccgtactccgacgactcgtgcaaaggcggcgtctatggcttcacggaggaatggctcgctgcctgctccggcgagatggccggcaacgacgccgccggcttcttctccgacgagcacgcctccaacctcaacttcggttggtgcgcgagtggtaacgagggttgggaatga

SEQ ID NO: 270 - protein, 311 aa, Oryza sativa
MKRPTSSSRKSKKQGEDLAFSEEGSLPAVTMEQKDEAEMEEVDEEEEEEVDEDMAGGHAAQSPSPSCGLGEKKRRLALEQVRALERSFDTDNKLDPDRKARIARDLGLQPRQVAVWFQNRRARWKTKQLERDFAALRARHDALRADCDALRRDKDALAAEIRELREKLPTKPADTAASVKVEAGNDAAAGAAAATVCKDGSSDDSDSSVVFNDEASPYSGAAFIGFGPSFLVDDASAATVGCSSSLPALESKWHGPYSDDSCKGGVYGFTEEWLAACSGEMAGNDAAGFFSDEHASNLNFGWCASGNEGWE

SEQ ID NO: 271 - DNA, 810 bp, Oryza sativa
atgagaagtccagcagcgcttctcccggtggttgcagatggtggtggtggtgttggggtggaggaggagatggatgtggacgaggacatggcgatgtgcggcggccgcggcggcggcggcggggagaagaagcggcggctgagcgtggagcaggtgcgcgcgctggagcggagcttcgagacggagaacaagctggagccggagcggaaggcgcggctggcgcgcgacctcgggctgcagccgcgccaggtcgccgtctggttccagaaccgccgcgcgcggtggaagaccaagcagctcgagcgcgactacgccgcgctccgccaatcctacgacgcgctccgcgccgaccacgacgcgcttcgccgcgacaaggacgccctcctcgccgagatcaaggagctgaaggggaagctcggcgacgaggacgccgcggcgagcttctcgtcggtgaaggaggaggaggacccggcggcgtccgacgccgaccccccggccaccggcgcgccgcagggctcgtccgagagcgactcgagcgcggtgctgaacgacgcggagatccttccacacaagccagcgccggcggccgccgccgacgccgcggcctcggaggagacggaggcggtggtgaccggcgccgcgctgctccaccacgccgaggtgttcttccacgggcagcttctcaaggtggacgacgacgaggcggcgttcctaggcgacgacggcgcggcgtgcggcggcttcttcgccgacgagcatctcccgtcgctgccgtggtgggccgagcccaccgagcaatggacgacctag

SEQ ID NO: 272 - protein, 269 aa, Oryza sativa
MRSPAALLPVVADGGGGVGVEEEMDVDEDMAMCGGRGGGGGEKKRRLSVEQVRALERSFETENKLEPERKARLARDLGLQPRQVAVWFQNRRARWKTKQLERDYAALRQSYDALRADHDALRRDKDALLAEIKELKGKLGDEDAAASFSSVKEEEDPAASDADPPATGAPQGSSESDSSAVLNDAEILPHKPAPAAAADAAASEETEAVVTGAALLHHAEVFFHGQLLKVDDDEAAFLGDDGAACGGFFADEHLPSLPWWAEPTEQWTT

SEQ ID NO: 273 - DNA, 834 bp, Oryza sativa
atgaagcgacccggcggtgccggcggcggcggaggcagcccatcgctcgtcacgatggctaattctagtgatgatggatatggaggggttgggatggaggcggagggggacgtggaggaggagatgatggcgtgcggcggcggcggggagaagaagcggcggctgagcgtggagcaggttcgcgcgctggagcggagcttcgaggtggagaacaagcttgagcctgagcggaaggcgcggctggcgcgcgacctcggcctgcagccgcgccaggtcgccgtctggttccagaaccgccgcgcgcggtggaagaccaagcagctcgagcgcgactacgccgcgctccgccattcctacgactccctgcgcctcgatcacgacgcgctccgccgcgacaaggacgccctcctcgccgagatcaaggagctgaaggcgaagctcggggacgaggaggcggcggcgagcttcacgtcggtgaaggaggagccggcggcctccgacgggccaccggcggcgggatttgggtcgtccgacagcgactcaagcgcggtgctgaacgacgtggacgcggccggcgccgcgcccgcggcgacggacgcgctggctccggaggcgtgcacgtttctcggcgcgccgcccgccgcgggcgcgggcgcgggcgcagcggcggcggcgagccacgaggaggtgttcttccacggcaatttcctcaaggtggaggaggacgagacggggttcctcgacgacgacgagccgtgcggcgggttcttcgccgacgatcagcccccgccgctgtcgtcgtggtgggccgagcccacggagcactggaactga

SEQ ID NO: 274 - protein, 277 aa, Oryza sativa
MKRPGGAGGGGGSPSLVTMANSSDDGYGGVGMEAEGDVEEEMMACGGGGEKKRRLSVEQVRALERSFEVENKLEPERKARLARDLGLQPRQVAVWFQNRRARWKTKQLERDYAALRHSYDSLRLDHDALRRDKDALLAEIKELKAKLGDEEAAASFTSVKEEPAASDGPPAAGFGSSDSDSSAVLNDVDAAGAAPAATDALAPEACTFLGAPPAAGAGAGAAAAASHEEVFFHGNFLKVEEDETGFLDDDEPCGGFFADDQPPPLSSWWAEPTEHWN

SEQ ID NO: 275 - DNA, 375 bp, Oryza sativa
atgtcatcctctctctttcttcttcctcctctctttctttctctcttctctccccttcggctagccgcagggagcacgggctggggcggtagtgggcggggacaagagaggcggagggagctgaagcggcgccggcggcggcacacgctctccagcctcagcggcaagcgtggtgcgccatctgccgctgccgccgccgtcggcggcagcgacgacgaggactccgacgacggatcccgcaagaagctccgcctctccaaggaccaagccgccgtcctcgaggacaccttcaacaagcacaacaccctcaaccccaagcagaaggcggcgctggcgaggcagctgaatctgaagccgcggcaggtggaggtgtag

SEQ ID NO: 276 - protein, 124 aa, Oryza sativa
MSSSLFLLPPLFLSLFSPLRLAAGSTGWGGSGRGQERRRELKRRRRRHTLSSLSGKRGAPSAAAAAVGGSDDEDSDDGSRKKLRLSKDQAAVLEDTFNKHNTLNPKQKAALARQLNLKPRQVEV

SEQ ID NO: 277 - DNA, 1767 bp, Oryza sativa
atgttttattcaagtcccttttgttcatctcctttgcagattccatttctgacccaaattttggctattcctcatgatgagtttgtctcaaactggtgctctgttaatctgccagtgatagaagaagacgctaatcttgattatgatccatttggtgcagctgagctggcactggcagctgctggtaataagttaactgaagctaaagcaaactattcttgcccttttcgccctatcagtatgccttctatagcatatgcgcagacaagaacatcatgtgtggtgaaaataatagcaaatttgcatgtttttgtcccaaacatatgcgaagagcaagaaagagacctttttcttcagaaatttcagaagtacttggtatcagggaatcctagatcatcagttgatcatccagcatcagctgatctcaaggccactacagtttgcagaaacttgggatctttgtctgagtatgctagatcgttaattcctaataacttgttaaacgaggaagatgtgcaattgttaagtgaatttgcttataagttacaaacttggtgtaaatcacatgttggacagagtacatcccaggcagtaaagattgatccgtcatcagaaagcaaggaagactttaagccactgcagcatcccttgataccaagtactgttgttccagattccagtataaataaccttccgaagaacatggaagagcctacaccaacaaacatggaagagcctgcaccaacaccctcaacaaagcaagagggaaatgccagggatgagactcctagaagcactgtcgctttaaatggtgggttcctgcagaattcagtcggccaggacttagtccatcttggtgtggcgagaactagttcaggctttctagggggaggtaccagtacaagtacaggatccctgcgctgcaaaatggatcttgatcctgcatccagcagtatggaccatttcaaaacaccagatagaaaagaaagtggtcttcaggatgatgagaaaggagacactcacatgtatgatgagagacaacctaagagaaggaagcgaaccattatgaatgataggcaaataaacgaaatcgagaaggctcttattgatgagcctgagatgcataagaatgctgctttactgcaggcatggtcagagaagttaagtgggcagggctcggagattacgtcatctcagctaaagaattggctgaacaacagaaaagctaagcttgctcgtattgcgaaagaaagaggagtactatctgagggtgagaacgcagataagccatctacgccagctactccccaccactgtgactcctcagaaagtgctggcgaggagagctacttgccacctgcgagggtcatgagtgctctaggcatatccaagggcagcagatttgtgagcccagatggcaatgagacaacatcacaggcagaattcaatcaaaatatcatgcttagccgccctttcacaagatcattctcatttgaacctggccgtcttgtttcgctcattgataatgatgggaaggaggttggcaggggaaagatcttccaagttgaggggagactgcaagggaaggccctgacagatactcgcgtttgcatcgttgatgttattgagctcaagattgagaaatggcgggagctacctcatccctcggaagcatcaggaagaacattccaagaggcagaatcaaggaacggtggtgtgatgagggtcgcgtgggatgtcatcagactatctccagtggttcagtaa

SEQ ID NO: 278 - protein, 588 aa, Oryza sativa
MFYSSPFCSSPLQIPFLTQILAIPHDEFVSNWCSVNLPVIEEDANLDYDPFGAAELALAAAGNKLTEAKANYSCPFRPISMPSIAYAQTRTSCVVKIIANLHVFVPNICEEQERDLFLQKFQKYLVSGNPRSSVDHPASADLKATTVCRNLGSLSEYARSLIPNNLLNEEDVQLLSEFAYKLQTWCKSHVGQSTSQAVKIDPSSESKEDFKPLQHPLIPSTVVPDSSINNLPKNMEEPTPTNMEEPAPTPSTKQEGNARDETPRSTVALNGGFLQNSVGQDLVHLGVARTSSGFLGGGTSTSTGSLRCKMDLDPASSSMDHFKTPDRKESGLQDDEKGDTHMYDERQPKRRKRTIMNDRQINEIEKALIDEPEMHKNAALLQAWSEKLSGQGSEITSSQLKNWLNNRKAKLARIAKERGVLSEGENADKPSTPATPHHCDSSESAGEESYLPPARVMSALGISKGSRFVSPDGNETTSQAEFNQNIMLSRPFTRSFSFEPGRLVSLIDNDGKEVGRGKIFQVEGRLQGKALTDTRVCIVDVIELKIEKWRELPHPSEASGRTFQEAESRNGGVMRVAWDVIRLSPVVQ

SEQ ID NO: 279 - protein, 6 aa, Artificial sequence
  motif I
RKKLRL

SEQ ID NO: 280 - protein, 24 aa, Artificial sequence
  motif II
TKLKQTEVDCEFLRRCCENLTEEN

SEQ ID NO: 281 - protein, 10 aa, Artificial sequence
  motif III
TLTMCPSCER

SEQ ID NO: 282 - DNA, 2193 bp, Oryza sativa; identical to SEQ ID NO: 54

SEQ ID NO: 283 - DNA, 58 bp, Artificial sequence
  primer: p01294
ggggacaagtttgtacaaaaaagcaggcttcacaatgatgttcgagaaagacgatctg

SEQ ID NO: 284 - DNA, 52 bp, Artificial sequence
  primer: p00402
ggggaccactttgtacaagaaagctgggtttaggacctaggacgaagagcgt

SEQ ID NO: 285 - DNA, 622 bp, Arabidopsis thaliana
atgagcagacccggagattggaactgcaggtcatgcagccatctcaacttccagcgccgtgactcttgccagcgatgcggtgactctcgttccggccccggtggagttggtggcttagactttggtaatttcggtggcagagccatgtctgctttcggattcaccaccggctccgacgttcgtcccggtgattggtactgcaccgtgggaaactgcgggacacacaacttcgccagtcgctccacctgcttcaaatgcggcactttcaaggacgagaccggcgctggaggcggaggtggtggcatcggcggtccggccatgtttgacgccgacattatgcggtctagagtccccggtaacggtggtcgctctagctggaaatccggcgactggatttgcactaggattggttgcaatgagcataactttgcaagcagaatggaatgcttcaggtgcaatgcaccaagggacttcagcaacagaacctctttctaagttatacaaactgcttttgaagtagccttgtctacccagctttcttgtacaaagttggcattataagaaagcattgcttatcaatttgttgcaacgaacaggtcactatcagtcaaaataaaatcat

SEQ ID NO: 286 - protein, 164 aa, Arabidopsis thaliana
MSRPGDWNCRSCSHLNFQRRDSCQRCGDSRSGPGGVGGLDFGNFGGRAMSAFGFTTGSDVRPGDWYCTVGNCGTHNFASRSTCFKCGTFKDETGAGGGGGGIGGPAMFDADIMRSRVPGNGGRSSWKSGDWICTRIGCNEHNFASRMECFRCNAPRDFSNRTSF

SEQ ID NO: 287 - DNA, 717 bp, Gossypium hirsutum
atgagcaggccaggagattggaactgcaggtcatgccaacacctcaacttccaaaggagggacaactgccaacgttgcggtgaatctcgatacggtgttagagtcggctcgacattcgggtttaccgctggctcggacgttcgacctggtgactggtattgcacggctggaaactgcggcacccacaatttcgccagccggtctacttgtttcaattgcggcgcgttcaaggacgagtcggctggaggtttcgacttggacatgtctcgatcaagagggttcggaggtaaccgatccggctggaaatcaggggattggatatgtaccaggttagggtgcaatgaacataattttgctagcagaatggaatgtttcagatgcagtgctccaagagaattcaacaatagaacttcatattaaatcacatgcatgctactatatccatttttgggtgttttgaggcaattaataggagattataatgagagagtgttactggctttgatgatgaacaccacaagcattttgtcatgtttcttttataagattcatggcaatgtagtactttttcttgtgatgattatttatggtttcaattctatggttttattgtcttttattttagagagttttatttatatttttgtaatggtgctttggctttattaaaagaagatgattctcttctgtcttttcaaaaaaaaaaaaaaaaaaaaa

SEQ ID NO: 288 - protein, 139 aa, Gossypium hirsutum
MSRPGDWNCRSCQHLNFQRRDNCQRCGESRYGVRVGSTFGFTAGSDVRPGDWYCTAGNCGTHNFASRSTCFNCGAFKDESAGGFDLDMSRSRGFGGNRSGWKSGDWICTRLGCNEHNFASRMECFRCSAPREFNNRTSY

SEQ ID NO: 289 - DNA, 937 bp, Zea mays
cgggcacgaccagcaacacaacagccgagctttgcttaggcaagatgaacaggaagccaggagactgggactgcagggcgtgccagcacctcaacttcagccgccgagacatatgccagcgctgcagcgagccacgtggagttgctgatcgtggcagtggcggcggcggaggaggcgactacgccagcttcggtggccgcggtggctcctccttcggcggcggctttggcgctgctggctccgacgtccgccctggtgactggtactgctcctgcggcgcgcacaacttcgccagccgctccagctgcttcaagtgctccgcctacaaggaggaggccgctgtgaacagtggcgctggcggctttgatggcgacatgtcacgctcacggggctacggcttcggcagcggtgctgctgctgctgctggtgctggcgctgcccgtactaccaaccgccccggttggaagtccggagactggatctgcaccagatccggatgcaacgagcacaacttcgccagcaggatggagtgcttcaggtgcaacgcaccgcgggactctggcactgaggtgtaggatcgagcaagttaaaaagtctgcagcgccgaagaaagcgacgacaagaggagtcctcatcacgtcgtaacgtaagagagagagtagtggatttgcaacaaaaaaaaaaaaaagacggccgcgatgctctgttactagctagctagttttgttcaaccacccatgccgtctcttctcttttattagatttggtttggttctcatagccctttaattaccatttgggacctatgtttgctgttctgtttcccgttcgtctcctccgcatgtttgcgcttggatcgagtcttgtgatgtaaccccccaaaaaacgcttgcttaactagtactgttgcttcttaataaaaaaaaaaaaaaaaaaa

SEQ ID NO: 290 - protein, 176 aa, Zea mays
MNRKPGDWDCRACQHLNFSRRDICQRCSEPRGVADRGSGGGGGGDYASFGGRGGSSFGGGFGAAGSDVRPGDWYCSCGAHNFASRSSCFKCSAYKEEAAVNSGAGGFDGDMSRSRGYGFGSGAAAAAGAGAARTTNRPGWKSGDWICTRSGCNEHNFASRMECFRCNAPRDSGTEV

SEQ ID NO: 291 - DNA, 501 bp, Oryza sativa
atgaacaggaagccaggagactgggactgcagggcgtgccagcacctcaacttcagccgccgggacctatgccagcgctgcggcgagccgcgtggcgccgctgatcgcggcagcggtggtggcggtgactacgccaacttcggcggccgtggtggttcctccttcggtggaggctttggcactggctctgatgtccgcccaggtgactggtactgcaactgcggcgcgcacaacttcgccagccgctccagctgcttcaagtgcgctgctttcaaggacgatgctgccgtcaacagtggcggcgctggtgcctttgatggtggggacatgtcgcgctcgcggggctacggcttcggcagcggcgccgtccgcgccagccgccctggctggaagtctggcgactggatttgcaccaggtctggatgcaatgagcacaacttcgccagcaggatggagtgcttcaggtgcaacgcaccgcgggactccggcactgaggtgtaa

SEQ ID NO: 292 - protein, 166 aa, Oryza sativa
MNRKPGDWDCRACQHLNFSRRDLCQRCGEPRGAADRGSGGGGDYANFGGRGGSSFGGGFGTGSDVRPGDWYCNCGAHNFASRSSCFKCAAFKDDAAVNSGGAGAFDGGDMSRSRGYGFGSGAVRASRPGWKSGDWICTRSGCNEHNFASRMECFRCNAPRDSGTEV

SEQ ID NO: 293 - DNA, 859 bp, Arabidopsis thaliana
ataagctcttacactcatttcaactctctttttcgtttccattaccctcagaagaagatgaataggccgggagattggaactgcagattgtgtagccacctcaacttccagaggagggattcatgccaacgttgtagagagcctagaccgggcgggatcagtaccgatttactcagcggttttggtggccgtccggttagtagctccttcggtttcaacaccgggcccgatgtgcgacccggggattggtattgcaaccttggggattgtgggacacataattttgccaataggtccagttgtttcaagtgtggtgccgcaaaagatgagttttcatgctcaagtgctgctgcaacaaccgggtttatggacatgaatgttggtccgagacgtggcctttttggttttggcggcagcagtagtggtggtggtggtacgggccgttctccttggaaatctggagattggatttgcccaaggtcaggctgtaacgaacataacttcgcaagcaggtcagagtgtttcaggtgtaacgcaccaaaggaacttgccaccgaaccaccctattagtcatttagtcctcctaccttcttcatcatttccaatactctggaagcattagaggagagcagaaaggtgaagaatcgaagcaagataccgaccgcccttaatctcttgatttgtttaatttcttagatttgactcgttttatatctcgtagtagtcagacctatgttagaatgtaagcatgtcgagagttttccgaagcattttgttctgatatcggtctcctagctagtatgtaagtttgtttgaatgtattcttatttctgataaagttgtttccttctgattccgc

SEQ ID NO: 294 - protein, 170 aa, Arabidopsis thaliana
MNRPGDWNCRLCSHLNFQRRDSCQRCREPRPGGISTDLLSGFGGRPVSSSFGFNTGPDVRPGDWYCNLGDCGTHNFANRSSCFKCGAAKDEFSCSSAAATTGFMDMNVGPRRGLFGFGGSSSGGGGTGRSPWKSGDWICPRSGCNEHNFASRSECFRCNAPKELATEPPY

SEQ ID NO: 295 - DNA, 834 bp, Oryza sativa
cctagtactaagaacagcaaccacctctgaaagctttacaagttcgcaggggcttaactgcgaatgaacatccagaggaagccaggagactggaactgcaaatcgtgccagcatctcaacttcagccgccgggactactgccagcgctgccataccccacgccaggacctgccgcttggcgatggttatgtcccaggtggtgtgctgtcctccctggacattcgcccgggcgactggtactgcaactgcggctatcacaactttgctagccgagcaagctgcttcaaatgtggcgccattgtgaaggaccttccagcaggccaaggtggtggtgttgccaacggtgactttgcccgtgccctcgacagcagcgcagttcgtgctgggtggaaggcgggtgactggatttgcacaaggcctggttgcaacgtccacaactttgcaagtaggattgagtgctataggtgcaatgcacctagggaagcaggtaatgtgaagtaagaaaagactgacgcgaccaaagatcgtgagacgtgacgagctggccgaggatgaataaagtgactgctgtcagttgtcacattcacaggctgcgatccagaaactatggatgggactatgtagtaacgtgctgatatattattgctaagtgttactactgcatggttgcaagggtggtagaagtaccttagcttccaagatcgttgtaatgtgtgagtttaattttggcgttttaagtaataagtctagtgattgcaggattgtacggggtaatgtacttgcattatccattataatcttaagcatccaatataattatgcaaaaaaaaaaaa

SEQ ID NO: 296 - protein, 145 aa, Oryza sativa
MNIQRKPGDWNCKSCQHLNFSRRDYCQRCHTPRQDLPLGDGYVPGGVLSSLDIRPGDWYCNCGYHNFASRASCFKCGAIVKDLPAGQGGGVANGDFARALDSSAVRAGWKAGDWICTRPGCNVHNFASRIECYRCNAPREAGNVK

SEQ ID NO: 297 - DNA, 958 bp, Oryza sativa
aagcctccatccatccatccattcatcagagctcaagctcaagcaagcaagcttgctagctagctgctgagcagcattccagtctgctccagctagctcagctctctctgctctgctctttgctcgataacgaccatcatcttcttcttcttcttcttcttcttcttcttcttcttcttgtacattctatttgctcgatagatagatagatagatagataggtagatagagatggagacgaaggcggcggcgatggcgatgaggaagccgggggactggagctgcaggtcgtgccagtacgtgaacttctgcaagagggaggcgtgccagcggtgcggggaggcgaagctcggggtggagcggacggactacgccgccatgggcggcgggtgggaggtgaagcccggcgactggtgctgccgctgctgcgccgtcaacaactacgccagccgcggcagctgcttcaagtgcggcgccgccaagaacgactccgccgccgccgtcgcccagggctggggcttctccgtcgcctcccaggccggctggaagaacggcgactggatctgccccagaatggaatgcaacgtgcagaactacgctaacagaaccgagtgcttccggtgcaatttccccagatactacgttgattgatctgacatatatgatatatgccttgcactgagaagaaatgaaagggaaataaaatttacgagatcgaagatcgacggacaagattgatcggccaccggtcatgcccttcagggttttcttttttctatttttttttagaataaccctcgataacctgagggttttttttcatttgtaagagcggtaacggtactaaaaaaacacaaaaacggcacaaaattgtggctgatgactgatcagtcttcctcttttttttcccaataaaaggcagataattaagaaagcaaaattattaaaaaaaaaaaaa

SEQ ID NO: 298 - protein, 139 aa, Oryza sativa
METKAAAMAMRKPGDWSCRSCQYVNFCKREACQRCGEAKLGVERTDYAAMGGGWEVKPGDWCCRCCAVNNYASRGSCFKCGAAKNDSAAAVAQGWGFSVASQAGWKNGDWICPRMECNVQNYANRTECFRCNFPRYYVD

SEQ ID NO: 299 - DNA, 519 bp, Beta vulgaris
atgagtaggccaggtgattggaattgtaggtcatgcagccacttgaacttccaaaggagggactcctgccagcgctgtggggacgtacgtcctgacggccgaggcggcggagggggaggaggagactttggcagtagctttggagggaggtcaggtgggtccccctttggtgggggttttgcagggcccgatgttaggcccggtgattggtattgtagcattggcaactgtggggcccacaactttgccagcaggtctagctgcttcaagtgtggggcctacaaagaggaagctggctgtggtgatagcatgggccgttcacgtggaggattttcctttggtggcatcggcggtggcggtagcggtgccgctaccggccgctcaggctggaaatccggtgactggatttgcactaggtcgggttgcaacgagcataacttcgctagtaggactgagtgcttcagatgcagggaaccaagggactccggtaatgcaatgctaaaggaagtaccatgctga

SEQ ID NO: 300 - protein, 172 aa, Beta vulgaris
MSRPGDWNCRSCSHLNFQRRDSCQRCGDVRPDGRGGGGGGGDFGSSFGGRSGGSPFGGGFAGPDVRPGDWYCSIGNCGAHNFASRSSCFKCGAYKEEAGCGDSMGRSRGGFSFGGIGGGGSGAATGRSGWKSGDWICTRSGCNEHNFASRTECFRCREPRDSGNAMLKEVPC

SEQ ID NO: 301 - DNA, 807 bp, Arabidopsis thaliana
atgggagacggaagagaaggagactgggaatgtttaggatgcagaaacaggaattatgcgtttagatcattctgtaacagatgcaagcagcctcgtcttatcatggataataatacttctccaaactctaagtggcttcctcgtatcggcgattggatctgcactggttgtactaacaacaattatgcatcacgagaaaagtgcaagaaatgtgggcaatctaaggaagtagcagcattgtcagcacttgctatccctggagcttctcttcaaactcatctccattacttcacccgtggacctgagtcacatgatcaacctggttctttactcgcattctctaacgctacaaatcaagcttcggttcataaagaatggaggagtggtgactggatttgcagatgtggttttcacaattattcctctcgtatacagtgcaaaaagtgcaatgaaatagctccactagcccttggtacaaagagattagcatcagaagctttggctcatgaatgggatagcaaaagactgaatcaaggatatacaagcatgcaaacacagtcagcgatatatgcatcttttcctggtatgagcctaggaagggtctcaaattggcaacttcctctcccgtttctacaacaacactcaacacctgctttacttggaatgggagtgaaacaatggcgtgatggcgactggatgtgtacaaattgcaagaatcacaattatgcatcacgagcagagtgcaataggtgcaagactacacgagatatccttgatcaggacataactccaacagaacaatcttga

SEQ ID NO: 302 - protein, 268 aa, Arabidopsis thaliana
MGDGREGDWECLGCRNRNYAFRSFCNRCKQPRLIMDNNTSPNSKWLPRIGDWICTGCTNNNYASREKCKKCGQSKEVAALSALAIPGASLQTHLHYFTRGPESHDQPGSLLAFSNATNQASVHKEWRSGDWICRCGFHNYSSRIQCKKCNEIAPLALGTKRLASEALAHEWDSKRLNQGYTSMQTQSAIYASFPGMSLGRVSNWQLPLPFLQQHSTPALLGMGVKQWRDGDWMCTNCKNHNYASRAECNRCKTTRDILDQDITPTEQS

SEQ ID NO: 303 - DNA, 1264 bp, Arabidopsis thaliana
ctatttctcctaccgtcgaactaaatcctagggcacaggtgaaatcgccgagtgacgtctagccaccgcaccgcctccttctccggttatctcgctactaatcagactattccacagctatgtcacaggtagacaacagaaattcatcagcagccaagcgtgctagaactgacggggggcgtagagaagatgattggatctgcccaagttgtggcaatgtcaacttttcattcaggacaacttgcaatatgcgtaattgcactcagcctagacctgcagatcataatggaaagtctgctcccaaacctatgcaacatcaacaaggtttctcatcacccggggcatacttaggatctgggggtccccctccagtatatatgggcgggtcaccatatggatctcctctctttaatggatcatctatgcctccttatgacgtcccattttctgggggttcgccttaccattttaactataatagccgaatgcctgccggagctcattacagaccattacatatgtctggaccaccaccataccatggcggatctatgatgggaagtggtggtatgtatggaatgcctccaccaatagacaggtatggccttggtatggcaatgggtcctggttctgccgctgccatgatgccaagaccaaggttttacccagatgaaaaatcacaaaagagagattcaactcgcgataatgattggacatgtccgaattgtggtaatgtaaacttctcattcagaactgtatgtaacatgaggaagtgcaacactccaaagcctggttctcagcagggtggaagctcagataaaatatccaaacaaaatgcaccggaagggagctggaagtgtgataactgtggaaatataaactacccattcaggagcaaatgcaacaggcaaaactgtggagctgataagcctggggatcggtcgaatggatctccgtcccgtgcaccagaagagaacgatcagtgagtcgtagacatgtttgggggttgagaagggtgagtctaatccagcgggtgtcgtaatgtcagtcaatgtctcgtcaggtcaggtcgtccatgttgctgcgtcgtcagtcaagttgcttctatgcatttgtctctttacttcccttgcgtggttgtggattgtattaataatgcaaaaattgtttatttactttgtcgtcctcgtggatcttgtcttgctatagaatcctcctccaggtccatactgttttacatcctaatcttaagtaagttggcacc

SEQ ID NO: 304 - protein, 288 aa, Arabidopsis thaliana
MSQVDNRNSSAAKRARTDGGRREDDWICPSCGNVNFSFRTTCNMRNCTQPRPADHNGKSAPKPMQHQQGFSSPGAYLGSGGPPPVYMGGSPYGSPLFNGSSMPPYDVPFSGGSPYHFNYNSRMPAGAHYRPLHMSGPPPYHGGSMMGSGGMYGMPPPIDRYGLGMAMGPGSAAAMMPRPRFYPDEKSQKRDSTRDNDWTCPNCGNVNFSFRTVCNMRKCNTPKPGSQQGGSSDKISKQNAPEGSWKCDNCGNINYPFRSKCNRQNCGADKPGDRSNGSPSRAPEENDQ

SEQ ID NO: 305 - DNA, 1853 bp, Oryza sativa
cagtttccactttcttccaaagccgaaaaatcgagagagaaagagcaaaaccctaaccgcggcgctccgcccccttccgccgccggattcctcctcctccttcgtccgccttcgccggcgccgccctgctccgaaggagcccaggccttgtcgccgcgtcgcttgccccgccgccggtttcagcagcagccacccccaccaccatgtcttctcaggtcgacaaccgtagccaatctgctggaaagcgtgcccgcaccgacggtgggcggcgtgaggacgactgggtttgccccagctgccagaacgtcaacttcgccttccgcaccacctgcaacatgcgcaattgcaaccaatccaggcccaccgactatacgaaggatatgcagaaacctatgcagacaccgccgccccatttccccatgtcagggggatacatgagcccagggacgccgccatccatgtacctcgggggtggtgctcccccttatggcacctccctctatggcggacctgctttaccacgttatggtattgctcagttccctgggggttctggatatccatatggctatggtggccgcctgccaatggggagcccctatgggccgccgatgcatatggcagggcctccatattctgctggatccatgatgggaccaggtggaatgtatgggatgcccatggacagatatagcttgggcttacctgctggtcctggtccaatgggcgcgagggctggttcatattccgaggaaggatcccagaagaagcctgcaggagctgggcgtgataatgattggaaatgccctaattgcaacaacattaactttgcattccggacagtctgtaacatgagaaagtgcaatacaccaagacctgaaaaccaggggtccaaacctgatggtgcaagaggtccaaaaccaaagatgccagaaggtagttggaagtgcgagaagtgcaataacataaactatccattccgcacaaaatgtaaccgtccaagttgcgaggctgaaaagccatttcagacaaacaatgctaatgagtcatctgctgatcaggacaatcagttgttgtcatgtaatattgtgaagcttttatcaaagctgcaactttcacatgactttcaagacaataatgagcaaacaaaggtggatcctcccggtggccctgctggagtaccgacaagttcgcacgccctgcgaatggcagctctcagtgagttgcagaacagtgttaagagctgatacccttttcattttccaaacaaggtgagaactttgatccatgtggatgtgcttctatcaggagcagctgacagtattgcatgcagtgatcttgctaaggaagttggagatgggaaacatcgtgtgatggccagccttgatgtaagaatgcaaatcagtcttactccgtaccatatctgtgtggagtgtgcacaccggaagcatagtcattttttgaatggtcgattgcttcttccacagtaaagtctataataccagtgtgcaggtgtttttttccctttctttcagtgtgaaggtgtttttttacccctttctttcgttcattcattctttttctttttccttgttgagacggtatcctggagcactttgtaatactctaatgtgcttcggaaagtagaatataagttgtgcttatgggcgggccaaaatgctttggccgttagttgcatgacagcctttccaacatgctgctgcctagccgtagttctcccaaaaatgaaaccatcttgagatccgtttgcggttgaactgaaattagacggtatctctggtttcaacatcatcctttaaaccctggatgaaagatttgcaatattcctgcgg

SEQ ID NO: 306 - protein, 347 aa, Oryza sativa
MSSQVDNRSQSAGKRARTDGGRREDDWVCPSCQNVNFAFRTTCNMRNCNQSRPTDYTKDMQKPMQTPPPHFPMSGGYMSPGTPPSMYLGGGAPPYGTSLYGGPALPRYGIAQFPGGSGYPYGYGGRLPMGSPYGPPMHMAGPPYSAGSMMGPGGMYGMPMDRYSLGLPAGPGPMGARAGSYSEEGSQKKPAGAGRDNDWKCPNCNNINFAFRTVCNMRKCNTPRPENQGSKPDGARGPKPKMPEGSWKCEKCNNINYPFRTKCNRPSCEAEKPFQTNNANESSADQDNQLLSCNIVKLLSKLQLSHDFQDNNEQTKVDPPGGPAGVPTSSHALRMAALSELQNSVKS

SEQ ID NO: 307 - DNA, 1078 bp, Oryza sativa
ctggtctctcgctctcttcgctcgcggcggcttctccgcctccgcctccgccgccctctcctcctctcgcctcgccgccggcgccgccagccaccgcgcgggtcgggcgggccgtatcttcctttctgttccgatggcttccgcgaaggtggagaaccgcggcggcggtgggttcggttcgaagaggtcacgcaacgacgtgtctgtaagggagggggactggacttgtcctcagtgtggtaatgtcaacttcagttttagaaatgtttgcaaccgcggagcctgtggtgcaccccgtccatcaccgagtctaagcccaagagtgccacctcctcctgctgctggatatgatcggccacatcttggatatgatcggccacatctgttttatggtagtgctggcaccccacctcctattcctcttggatctggtagctatggtgccccctatccacatcttggcttgcggtatggatatggtccaccagtaggacctcctgcttcatatggccttttttcttcttatggtcaacctggaccaatgggcagtccgatgggaggcatgggctatggccctggacctgagctaggccgatatggttatggttttagaggatctccaatgccggtttctagcccatggtctggtggagcattagtggaaaataatgacagctctgcttcacgcaagcgtcgtggaggcccagatggaatggctgagaatgactggatctgcccaaagtgtgagaatgtcaacttttccttcagaaacagttgcaatatgaagaaatgtggagctccaaggccaagccctggatctaatgctaccccatgtcgcaaagacaaggacgctccggaagggagctggacctgcccggagtgcaacaacctgaactaccctttccgcacggcgtgcaatcggaaaggctgcggaagcagcaggccggcagcggccacggcgaactaggaccctactaactttgcgccggcgattgggggcagagagagtattgttgtatcctagctatatacaagttaatttaaactgtaaacggctcaaatatattttcttgtggcc

SEQ ID NO: 308 - protein, 277 aa, Oryza sativa
MASAKVENRGGGGFGSKRSRNDVSVREGDWTCPQCGNVNFSFRNVCNRGACGAPRPSPSLSPRVPPPPAAGYDRPHLGYDRPHLFYGSAGTPPPIPLGSGSYGAPYPHLGLRYGYGPPVGPPASYGLFSSYGQPGPMGSPMGGMGYGPGPELGRYGYGFRGSPMPVSSPWSGGALVENNDSSASRKRRGGPDGMAENDWICPKCENVNFSFRNSCNMKKCGAPRPSPGSNATPCRKDKDAPEGSWTCPECNNLNYPFRTACNRKGCGSSRPAAATAN

SEQ ID NO: 309 - DNA, 662 bp, Brassica rapa
ggtcttgttttctttcaataaacacataataagatagcttccaagttcatcaagaaataaacgtaagcgcacgcatacaataacctatcgaagatgagcagacccggagactggaactgtagatcatgcacccacctcaacttccagcgccgtgattcttgccagcgatgcggtgactcccgtttgggtgcaggtggagtcggtggcttagagtttggtgatttcggcggcagaggtatgtctgcttttggattcaccacgggctccgacgttcgtccaggtgactggtactgcacagttggaaactgcgggacacataactttgccagccgctccacctgcttcaaatgcggcactttcaaggacgaatccctcggtgggggcggcggcggtggcgtaggcgtaaggcggtccggtcatgttgacgctgacgttatgcggtctagagtctccggcaacggtggccgctccagctggaaatccggtgattggatttgcaccaggcttggttgcaatgagcataactttgcaagcagaatggagtgcttcagatgcaatgcaccaagggacttcagcatgagaacctctttctaagttacacaataatgcctttgaagtagccttgtttccaatctcttgggcaccgtttcaatcaatggaaa

SEQ ID NO: 310 - protein, 166 aa, Brassica rapa
MSRPGDWNCRSCTHLNFQRRDSCQRCGDSRLGAGGVGGLEFGDFGGRGMSAFGFTTGSDVRPGDWYCTVGNCGTHNFASRSTCFKCGTFKDESLGGGGGGGVGVRRSGHVDADVMRSRVSGNGGRSSWKSGDWICTRLGCNEHNFASRMECFRCNAPRDFSMRTSF

SEQ ID NO: 311 - DNA, 749 bp, Euphorbia esula
attttcccttcttcacccaaatatctctcaccttttaacaagagaaaagcaaaaagaagatgagcagaccaggagattggaactgcaggtcctgccagcatctcaacttccagagaagggactcgtgccagcgctgtggggactccaggtccgggactggaggttcaggagctgactttggcgggtttggaagccgggttgggtcctcattcgggttcagcaccgggtctgatgttcgacccggtgactggtactgtactgctggcaactgtggggcccacaactttgccagccgggcaagttgcttcaaatgtggagtttataaggatgattctggggcccctggcgggtttgattccgatatcctccgggcctctagaggttttggtagtggcagcaatcgctcttcttggaaatctggtgattggatctgcactcggtggggatgtaatgaacacaactttgcaagcagaatggagtgtttcaaatgcagtgcccctagggaccttagtaacagaacttcatactagacattttggatggtgcagcagccaagaaagagaattaagattactacttttaaattttattttatttttactatttgttttgggtgttattagagtggaaaacaaacatggcttaaaaacccatgtttcatccctaatttaagctaaggaagcaaaccccttttggcattttgtaaggcagatttaggattgtagtacttaattaattagtgggttgtt

SEQ ID NO: 312 - protein, 156 aa, Euphorbia esula
MSRPGDWNCRSCQHLNFQRRDSCQRCGDSRSGTGGSGADFGGFGSRVGSSFGFSTGSDVRPGDWYCTAGNCGAHNFASRASCFKCGVYKDDSGAPGGFDSDILRASRGFGSGSNRSSWKSGDWICTRWGCNEHNFASRMECFKCSAPRDLSNRTSY

SEQ ID NO: 313 - DNA, 646 bp, Gossypium hirsutum
ctccattctcttatttaactcaaactcaccaccttttccatttttctaattaagaaaagaaaagatgagcaggccaggagattggaactgcaggtcgtgccaacacctaaacttccaaaggagggactcctgccaacgctgcggggaattccggtcgggtgatcacttcggtagctacggtggtggcaggggtggctcctcctttggattcgccaccggctccgacgtccgacctggtgattggtactgcactgcgggaaactgcggtacccacaatttcgccagtcgttccagctgcttcaaatgtggtgcattcaaggacgaccctgccggaggtttcgacagcgacgttccgcgttctagaggatttggcggcggtaatcgatccggctggaaatccggcgactggatatgtaccaggtcgggatgcaatgagcataactttgctagccgaatggaatgtttcagatgcagtgccccaagagacttcaccgctagaacttcatactaaatacaagctatccagttttgggtgttgcaaaccaagagagactcaaatgagagaaaaaattttacggggttagggttacccgggtaaatatatggcttgggggggtgtggcaccagggttgaaaacaccagggtg

SEQ ID NO: 314 - protein, 148 aa, Gossypium hirsutum
MSRPGDWNCRSCQHLNFQRRDSCQRCGEFRSGDHFGSYGGGRGGSSFGFATGSDVRPGDWYCTAGNCGTHNFASRSSCFKCGAFKDDPAGGFDSDVPRSRGFGGGNRSGWKSGDWICTRSGCNEHNFASRMECFRCSAPRDFTARTSY

SEQ ID NO: 315 - DNA, 613 bp, Vitis vinifera
ggtcttcttccatctctgcacagttatcctgatatttccttggaaaacatgagcaggccaggagattggaactgcaggtcatgccagcacatgaacttccaaaggcgcgattcctgccaacgctgcggtgacccaaaatcgggtgggggtgactttggaagctttggtgggaggggtggatcctcctttgggttcacgggctcggatgtccgcccaggggactggtactgcaatgcaggcaactgtggagctcacaactttgctagccgctctaactgcttcaagtgtggtgcattcaaagatgagtctgctgggggctacgattccgacatgtcacgctcccgaggtttcgggttcggcggtggcagcggccggtctgggtggaaatccggtgattggatatgcagcaggtctggatgcaatgagcacaactttgctagcagaatggaatgtttcagatgcaatgccccgagggacttgagtaacaaaacttcatactagacatatatcttccatttttgggtactgcagccagccaagagagaccaaatcatagaatatctattaatccttgtgttgttattaatttctttgctttgggtgctaggttctt

SEQ ID NO: 316 - protein, 150 aa, Vitis vinifera
MSRPGDWNCRSCQHMNFQRRDSCQRCGDPKSGGGDFGSFGGRGGSSFGFTGSDVRPGDWYCNAGNCGAHNFASRSNCFKCGAFKDESAGGYDSDMSRSRGFGFGGGSGRSGWKSGDWICSRSGCNEHNFASRMECFRCNAPRDLSNKTSY

SEQ ID NO: 317 - DNA, 844 bp, Populus trichocarpa
tcagaccatttccctttcatcttctagctagcatagcttctctcagaggtttttgaaacccctttttgccattcttctctcacttagtatacttagtcttctctaatcaattcataagcaaatatgaacaggccaggagactggaactgcaggtcatgccaacacctcaatttccagaggcgtgactcttgccaacgttgtggggaccccaggtccgcaggtgattttgggggtttcggtgggcggggtggctcatcacttgggttcaccgggtcggatgttcgtcccggtgattggtactgcactgccggaaactgcggggcccacaactttgctagccgttctagttgcttcaaatgtggagtgtacaaggaaatggactccgccgggggcttcgattctgatttttctcgaactagagggtttggtgggagcactggaggtggcaatcgatctggatggaaatccggagactggatttgcactaggtggggatgcaacgaacataactttgctagcagaatggagtgcttcaagtgcaatgccccaagagatcttagcaacagaacttcatactagatacaatttctccatttcctgggactgcaccagccaagaacaaagacaacatgattaaaaaatatatatcactacttttcattttcttcttgatttctttttgtattagctagctagggtcttgaggcgagacatggtttaagaaccatgtttactgctttgagctatatataacccttggcattttgtcaggcttcctgtaggaagtatatcgttgtctttgtgggcttttgatctattatattcattattgtaaccaagggag

SEQ ID NO: 318 - protein, 151 aa, Populus trichocarpa
MNRPGDWNCRSCQHLNFQRRDSCQRCGDPRSAGDFGGFGGRGGSSLGFTGSDVRPGDWYCTAGNCGAHNFASRSSCFKCGVYKEMDSAGGFDSDFSRTRGFGGSTGGGNRSGWKSGDWICTRWGCNEHNFASRMECFKCNAPRDLSNRTSY

SEQ ID NO: 319 - DNA, 785 bp, Gossypium hirsutum
ccttgcgtccgctttcttcttcattgttcctgtctttgcttactcaccccttatatatctgctttctcaagtaggggagaaaatatgagcaggccaggagactggaattgcaggtcatgccaacacctcaacttccaaaggagggactcatgccagcgctgtggagaaccaagacctggtggtggtgacagaggcggcgactatggaagctttggtggcaggggtggctcatctttcgggtttactggacccgatgttaggcctggtgactggtattgcactgtgggcaactgcggtgctcacaacttcgccagcaggtcgagctgcttcaaatgtggtgcggccaaagatgaatcatccggaggatttgaaagtgacatcccacgtatgaggggttatggttttagcactggcagctctagtcgctctaactggaaatctggagactggatttgcaccaggtcgggttgcaatgaacacaacttcgccagcaggatggaatgtttcagatgcaatgcaccaagggactccacccacaaatcttcatactaattaataaaattttcatttttgggtactgcagtcgcaagagagagatcagacaaggcaatcccagatcttgctttctttttcttttgtttgtttctttattttagatctttagatgaatcatgtttgaaagacttcagttgaagtacttaagctaatatcaaagtacatagggcatgcatgtaattgatgtatggtatcagcaatgttatatcagtgtctttgtgccaaaaaaa

SEQ ID NO: 320 - protein, 155 aa, Gossypium hirsutum
MSRPGDWNCRSCQHLNFQRRDSCQRCGEPRPGGGDRGGDYGSFGGRGGSSFGFTGPDVRPGDWYCTVGNCGAHNFASRSSCFKCGAAKDESSGGFESDIPRMRGYGFSTGSSSRSNWKSGDWICTRSGCNEHNFASRMECFRCNAPRDSTHKSSY

SEQ ID NO: 321 - DNA, 760 bp, Lactuca serriola
gtattcggaatcctcaaagaaacacacacttcctatccatcacaagaaagatgagcaggccaggagattggaactgcaggtcatgccagcacttgaacttccagaggagggactcttgccaaagatgtggggagacgaggtatggtggtgggggtggtgtgtttggtggtagaggaagtatcatcagcccttcagcatttggcttcacaggcccagatgtccgaccgggtgattggtactgcaatgttggcaactgcggggctcacaactttgctagccgctcgagctgcttcaagtgtggtgcgttcaaggatgacttagcttgtagtggtggtggtggtggtggtggtggcgtttttgatggtgatatgtcacgtggcaggggtttcgggtttggtggaggaagtggtggtggaggtggtggcagcagccgttcagggtggaagtccggtgactggatatgcggcaggcctggttgcaatgagcacaactttgcaagcagaatggaatgttttaggtgcaacgcacctcgggaatcgggtaacaagtctccttattaagcaggttgcggcatttccagttccgggtatcatggacttgctatctaccaaacaggaagagagataagtgatcgatcagacagaatcatgaagagcatccagttgataggaaattctaaactgaccccctttttgcccatatcataatatgcaatcctatctttgattttttttttccttttgttttatttttttttttt

SEQ ID NO: 322 - protein, 169 aa, Lactuca serriola
MSRPGDWNCRSCQHLNFQRRDSCQRCGETRYGGGGGVFGGRGSIISPSAFGFTGPDVRPGDWYCNVGNCGAHNFASRSSCFKCGAFKDDLACSGGGGGGGGVFDGDMSRGRGFGFGGGSGGGGGGSSRSGWKSGDWICGRPGCNEHNFASRMECFRCNAPRESGNKSPY

SEQ ID NO: 323 - DNA, 517 bp, Glycine max
tttctgcatctctaatacttcaactcactgtattatcttgagtaattttgcagagaagtaaaatatgagcaggccaggagactggaattgcaggtcgtgccagcacctgaactttcagaggagagactcatgccagcgatgtggggactcaaaatatggagatagagttgttgattttggtggttttggaggaagaggagggtcctcatttggtttaactggctcagatgttcgccccggcgactggtactgtgctgctgctaactgtggtgcacacaactttgctagccgctcaagctgcttcaagtgtggtgctttcaaggatgacttggctggaggaggctataacagttctgacatcttgcgctccagagcttttggtggcagtggaagacctggatggaaatctggtgattggatatgcagcagatcaggatgcaatgagcacaactttgctagcagaatggaatgttttaaatgcagtgctcccagggacacgtactagaaaaaatgagtt

SEQ ID NO: 324 - protein, 146 aa, Glycine max
MSRPGDWNCRSCQHLNFQRRDSCQRCGDSKYGDRVVDFGGFGGRGGSSFGLTGSDVRPGDWYCAAANCGAHNFASRSSCFKCGAFKDDLAGGGYNSSDILRSRAFGGSGRPGWKSGDWICSRSGCNEHNFASRMECFKCSAPRDTY

SEQ ID NO: 325 - DNA, 889 bp, Populus trichocarpa
gacaagttccttaaacaatctattgctctttcaactactagctaggttacacttcatttctgtacgtgttaattctcctatctttctcctttctgctttctcgagatgagcagaccaggagattggaattgcaggtcatgccagcacttgaactttcaaaggagggactcatgccagcgttgcggtgatccaaggcccggagagagagatcactatggaagtttcggtggaagatcatcagggggctcattcggatttacgggccctgatgttaggcctggtgattggtattgcacggctggcaattgtggagctcacaactttgctagtcgttcaagctgcttcaagtgtggtgtgtccaaggatgaatcctctggtggtggacttgatgctgatatgtcacggatgagaggttatggcttcggcggaggcggaggcggaggcagtggctctagccgtaattggaaatccggagactggatttgcaccaggtccggttgcaacgagcacaactttgctagcaggactgaatgctatagatgcaatgcaccaagagaatctagcagcaacaagtcttcgtattaatcatcgatatcgatagcatttttgtgtcctgcagtgctgcaaggagggaattaacgaagaaggctcatgagaaatcttggattcatctttttgctcttaattacttctatttttgttcttttggatagctgtactcttaagctgagaagctttagaaggatcatgggagtgaaattaagttcaaggagagctatatatatatcattagccagtaatttgtcaggttccctaaatatagacatgtagttctgtacttggtatcaatgtctttgtgttttgagacgggtttaagcccttgtcgttc

SEQ ID NO: 326 - protein, 159 aa, Populus trichocarpa
MSRPGDWNCRSCQHLNFQRRDSCQRCGDPRPGERDHYGSFGGRSSGGSFGFTGPDVRPGDWYCTAGNCGAHNFASRSSCFKCGVSKDESSGGGLDADMSRMRGYGFGGGGGGGSGSSRNWKSGDWICTRSGCNEHNFASRTECYRCNAPRESSSNKSSY

SEQ ID NO: 327 - DNA, 723 bp, Populus fremontii x Populus angustifolia
agggaaaaagaaagcctaaccctcctgcctgcctcaagcttaccccattatcgaggtctaaaacaagtataaaaacagccttagccccaatacgtaaatcacaagttccttaaacaatctattgctctttcaactactaggtttcccacttcatttctgtgcctactgattctcctctctttcaactttctgccttctcaagctagctagagaagggaagatgagcagaccaggagattggaattgcaggtcatgccaacacttgaacttccagaggagggactcgtgccagcgttgtggggacccaaggcccggagagagagatcattatggaagttttggtggaagatcagggggctcgttcggatttacggggcctgatgttaggcccggtgactggtattgctcggttggcaactgtggagctcacaactttgctagtcgttcaagctgcttcaagtgtggtatgtccaaggatgaatcctctggtggtgggcttgatgctgacatttcatggatgagaggttatggcttcggcggaggcagcgcctctagccgctctaattggaaatccggagactggatttgcaccaggtcaggttgcaacgagcacaactttgctagcaggactgagtgttacagatgcaatgcaccaagagaatcaggcagcaacaagtcttcgtattaatcatcaacatcgatcgcatttttgtgtactgcagt

SEQ ID NO: 328 - protein, 155 aa, Populus fremontii x Populus angustifolia
MSRPGDWNCRSCQHLNFQRRDSCQRCGDPRPGERDHYGSFGGRSGGSFGFTGPDVRPGDWYCSVGNCGAHNFASRSSCFKCGMSKDESSGGGLDADISWMRGYGFGGGSASSRSNWKSGDWICTRSGCNEHNFASRTECYRCNAPRESGSNKSSY

SEQ ID NO: 329 - DNA, 920 bp, Oryza sativa
cacctcacagcattttccaccttagagctcaccaacacagcagctgatacttgtttagggtaagacaagatgaacaggaagccaggagactgggactgcagggcgtgccagcacctcaacttcagccgccgggacctatgccagcgctgcggcgggccgcgtggcgccgctgatcgcggcagcggtggtggcggtgactacgccaacttcggcggccgtggtggttcctccttcggtggaggctttggcactggctctgatgtccgcccaggtgactggtactgcaactgcggcgcgcacaacttcgccagccgctccagctgcttcaagtgcgctgctttcaaggacgatgctgccgtcaacagtggcggcgctggtgcctttgacggtggggacatgtcgcgctcgcggggctacggcttcggcagcggcgccgtccgcgccagccgccctggctggaagtctggcgactggatttgcaccaggtctggatgcaatgagcacaacttcgccagcaggatggagtgcttcaggtgcaacgcaccgcgggactccggcactgaggtgtaatttgccgtacgtgtccgatcgatctggatccgatgaggcttgcagcagtgacgacgagcagcagaagcagcgttaagagttgtgatgtctacataagaagaagaagaaagtagaatgcaaaagaaatctccccatggttttactagttttgtttcttcccgttttagatttggttctgattcccatttgggaggacccgtcgacccctgattatctatgttttacccgttttatttcctgtttctttcggcatgtttgctcttcgatcgagtcgtgtaacccgaaacgcttgcgcttgagaagtattattattattaactagtatgttgcttcttaaaaaaaaaaaaaaa

SEQ ID NO: 330 - protein, 166 aa, Oryza sativa
MNRKPGDWDCRACQHLNFSRRDLCQRCGGPRGAADRGSGGGGDYANFGGRGGSSFGGGFGTGSDVRPGDWYCNCGAHNFASRSSCFKCAAFKDDAAVNSGGAGAFDGGDMSRSRGYGFGSGAVRASRPGWKSGDWICTRSGCNEHNFASRMECFRCNAPRDSGTEV

SEQ ID NO: 331 - DNA, 703 bp, Panicum virgatum
ccacgcgtccgcagaactccttgtcctaggccccagaaacacaaacgaccgctctttgtttaggcaagatgaacaggaagcctggagactgggattgcagggcttgccaacacctcaacttcagtcggcgggacctatgccagcgctgtggtgagccacgtggagctgctgaccgtggcagcggcggtggaggtgactatgccaacttcggtggccgtggtggctcctccttcggcggtggctttggtgctggctctgatgtccgccctggtgactggttatgttcctgcggcgcgcacaacttcgccagccgctccaactgcttcaagtgctctgccttcaaggaggaggctgctgtcaacagtggtgctggtggctttgatggtgacatgtcacgctcgcgctacggcttcggtggcggtgctgcccgcaccaaccgccctggttggaagtctggagactggatctgcaccaggtccggatgcaacgagcacaactttgccagcaggatggagtgtttcaggtgcaacgcaccacgggactccggcactgaggtgtaggatcggagctggtgcttcgaacggaccccgacgagcagaagcagcaagaaacctgataagaagagtagtagatttgcaaaaggcatcccggatgctctattactgttttgttccacccctaccgcttccttttagaatttggt

SEQ ID NO: 332 - protein, 163 aa, Panicum virgatum
MNRKPGDWDCRACQHLNFSRRDLCQRCGEPRGAADRGSGGGGDYANFGGRGGSSFGGGFGAGSDVRPGDWLCSCGAHNFASRSNCFKCSAFKEEAAVNSGAGGFDGDMSRSRYGFGGGAARTNRPGWKSGDWICTRSGCNEHNFASRMECFRCNAPRDSGTEV

SEQ ID NO: 333 - DNA, 435 bp, Medicago truncatula
atgaacaggaaaatgagctggtctggaggagattggatgtgtggtgcttgcgagcacataaatttcaagaagagagaagcatgccaaaattgtggatacccaaagtatggaggccctgacccatcgacctatagatataacaggactgaaacgttggcaggggactggttttgcacttctatgaactgtggagctcacaactatgcaagccgatcaaactgctatagatgtggtgcatttaaagatccttattcttctggatatgggggtaacatggtgggttctggaggatatggatcagattgtagttctcccccaggatggaaaagtggagactggatttgccctagaattggctgtggaatccataattatgcaagcaggacagagtgctacaaatgcaaaatgccaagggattatggtggtgcagactga

SEQ ID NO: 334 - protein, 144 aa, Medicago truncatula
MNRKMSWSGGDWMCGACEHINFKKREACQNCGYPKYGGPDPSTYRYNRTETLAGDWFCTSMNCGAHNYASRSNCYRCGAFKDPYSSGYGGNMVGSGGYGSDCSSPPGWKSGDWICPRIGCGIHNYASRTECYKCKMPRDYGGAD

SEQ ID NO: 335 - DNA, 513 bp, Medicago truncatula
atgagcagaccaggagattggaactgcaggacatgcaaccacctcaactttcaaagaagagaatcttgccaacgatgtggggagtcaagaatgacttctggctgcggcgccgttgattttggtggctcctttcttggtggaagaggctctagctccccttttcctttcaccaccggccctgatgtccgtcctggtgactggtattgcactgttggaaactgtggagctcacaactttgccagccgctccagctgcttcaaatgtggtgcccctaaggatattgataccttctcctctgactcctcagacatgccacgattattgagatcaccatacggttttggagcaggcagcgctggtggcggtgcctccactcgccccggctggaaatccggtgactggatatgcaccaggtctgggtgtaacgagcataacttcgccaatagaatggaatgctaccgatgcaacggtccaagggactctagtactggaagatcttcctatttatcgtga

SEQ ID NO: 336 - protein, 170 aa, Medicago truncatula
MSRPGDWNCRTCNHLNFQRRESCQRCGESRMTSGCGAVDFGGSFLGGRGSSSPFPFTTGPDVRPGDWYCTVGNCGAHNFASRSSCFKCGAPKDIDTFSSDSSDMPRLLRSPYGFGAGSAGGGASTRPGWKSGDWICTRSGCNEHNFANRMECYRCNGPRDSSTGRSSYLS

SEQ ID NO: 337 - DNA, 826 bp, Yucca filamentosa
ggcacaagctctcacgcaaccccttgtctccattttactcttccttcctctttcaagggacttgagaagatgaacaggaagccaggagactggaactgcaggtcatgccagcaccttaatttcagccgcagggactcgtgccagcgctgcggcgacccccggtcgatcggcagcgagcgatcggactacccgggcttcgtcgggggccgcggggggtcctcattcgggttcagcggctcggacgtcaggcccggggactggtactgccagtgcggggcccacaacttcgccagccgctcgagctgcttcaagtgcaatgctttcaaggatgagtccgccgctagcggcggcctcgacggcggcgacatgctgagatccagggggtttggcttcggcggcggcggcggcgctcgcagtggctggaagtctggtgactggatttgcaacaggtctggctgcaatgagcacaacttcgctagcaggatggaatgcttccgatgcaatgcacctcgagattcgggcactgaggtttaaggagacagccaagagagaagtgacgagatgagatcagtgatgatgataccagtagtaatctcgagttattactagttttgccaccagccccaactttatctccttttgatgtttttttagagcccccttctaaacggaggtgtcttctctttttcatccgtttgtttgcttttgaaagcttgcacttaccctttacacccccccgcccccctccaccttgtagtttgtgttgagagtgtctttgtaagtctttggagaagggctcctttagcttcttgggggagtcccttct

SEQ ID NO: 338 - protein, 154 aa, Yucca filamentosa
MNRKPGDWNCRSCQHLNFSRRDSCQRCGDPRSIGSERSDYPGFVGGRGGSSFGFSGSDVRPGDWYCQCGAHNFASRSSCFKCNAFKDESAASGGLDGGDMLRSRGFGFGGGGGARSGWKSGDWICNRSGCNEHNFASRMECFRCNAPRDSGTEV

SEQ ID NO: 339 - DNA, 614 bp, Hordeum vulgare
cggcacgaggcacttctcatcttggagctcagcagcacagcatccaagctttttcttcggcaagatgaacaggaagccaggagactgggactgcaggtcgtgccagcacctcaacttcagtcgccgggacctatgccagcgctgcggtgagccacgtagtgccgctgaccgtggcagcgtcggtggtgctcttggtggtgactacgccaactttggcggccgtggcgggggtggttcctcatttggtgccggctttggtgccggctctgacgtccgcccgggtgactggtactgcacctgtggagcgcacaacttcgccagccgctccagctgcttcaagtgtgctgctttcaaggaggaagctgccgtcaatggtggcgctggtggctttgatggtgacatgtcacgctcaaggggctttggctttggcgctgtcggtggcatgggtggcggcatgggagccggcgcagccggtggtcgtgccagtcgccctggctggaagtctcgcgactggatttgcaccaggtctggatgcaacgagcacaacttcgccagcaggcaggagtgcttcaggtgcaacgcgccgagggactccggtagcgccacaccatacg

SEQ ID NO: 340 - protein, 183 aa, Hordeum vulgare
MNRKPGDWDCRSCQHLNFSRRDLCQRCGEPRSAADRGSVGGALGGDYANFGGRGGGGSSFGAGFGAGSDVRPGDWYCTCGAHNFASRSSCFKCAAFKEEAAVNGGAGGFDGDMSRSRGFGFGAVGGMGGGMGAGAAGGRASRPGWKSRDWICTRSGCNEHNFASRQECFRCNAPRDSGSATPY

SEQ ID NO: 341 - DNA, 54 bp, Artificial sequence
  primer: prm5539
ggggacaagtttgtacaaaaaagcaggcttaaacaatgagcagacccggagatt

SEQ ID NO: 342 - DNA, 51 bp, Artificial sequence
  primer: prm5540
ggggaccactttgtacaagaaagctgggtagacaaggctacttcaaaagca

SEQ ID NO: 343 - DNA, 2193 bp, Oryza sativa; identical to SEQ ID NO: 54

SEQ ID NO: 344 - protein, 3 aa, Artificial sequence
  sequence motif 1
  VARIANT (1)..(1): /replace="Arg" /replace="Asp" /replace="Asn"
GDW

SEQ ID NO: 345 - protein, 3 aa, Artificial sequence
  sequence motif 2
GSW

SEQ ID NO: 346 - protein, 5 aa, Artificial sequence
  sequence motif 3
  VARIANT (3)..(3): /replace="Cys" /replace="Ser"
  VARIANT (4)..(4): /replace="Lys"
NFQRR

SEQ ID NO: 347 - protein, 5 aa, Artificial sequence
  sequence motif 4
  VARIANT (2)..(2): /replace="Tyr"
  VARIANT (3)..(3): /replace="Ser" /replace="Pro"
  VARIANT (4)..(4): /replace="Ser" /replace="Phe"
NFANR

1. Method for increasing seed yield of plants relative to control plants, comprising modulating expression in a plant of a nucleic acid encoding an AZ polypeptide, and optionally selecting for plants having increased yield, wherein said AZ polypeptide comprises at least one ankyrin repeat and at least one C3H1 Zinc finger domain.

2-154. (canceled)
